(19) United States
(12) Patent Application Publication
(10) Pub. No.: US 2024/0254444 A1
(43) Pub. Date: Aug. 1, 2024

(54) ENGINEERED CELLS FOR THERAPY

(71) Applicant: SHORELINE BIOSCIENCES, INC., San Diego, CA (US)

(72) Inventors: John Anthony ZURIS, Boston, MA (US); Carrie Marie MARGULIES, Waban, MA (US)

(73) Assignee: SHORELINE BIOSCIENCES, INC., San Diego, CA (US)

(21) Appl. No.: 18/289,461

(22) PCT Filed: May 4, 2022
(86) PCT No.: PCT/US2022/027685

§ 371 Date: Nov. 3, 2023

Related U.S. Application Data
(60) Provisional application No. 63/321,890, filed on Mar. 21, 2022.
(60) Provisional application No. 63/297,518, filed on Jan. 7, 2022.
(60) Provisional application No. 63/275,269, filed on Nov. 3, 2021.
(60) Provisional application No. 63/270,895, filed on Oct. 22, 2021.
(60) Provisional application No. 63/233,701, filed on Aug. 16, 2021.
(60) Provisional application No. 63/233,690, filed on Aug. 16, 2021.
(60) Provisional application No. 63/233,688, filed on Aug. 16, 2021.
(60) Provisional application No. 63/228,645, filed on Aug. 3, 2021.
(60) Provisional application No. 63/184,453, filed on May 5, 2021.
(60) Provisional application No. 63/184,202, filed on May 4, 2021.

(51) Int. Cl. C12N 5/0783; A61K 39/00; A61K 39/395; A61P 35/00; C12N 9/22; C12N 15/11; C12N 15/90

(52) U.S. Cl. CPC C12N 5/0646; A61K 39/39558; A61K 39/4613; A61K 39/464499; A61P 35/00; C12N 9/22; C12N 15/11; C12N 15/907; C12N 2310/20; C12N 2506/45; C12N 2510/00; C12N 2800/80

(57) ABSTRACT

Strategies, systems, compositions, and methods for genetically modifying cells to include one or more loss-of-function modifications and/or to include one or more gain-of-function modifications, as well as modified cells (and compositions of such cells) that include one or more loss-of-function modifications and/or that include one or more gain-of-function modifications, are described. In certain aspects, such modified cells include at least one gain-of-function modification within a coding region of an essential gene.

### CROSS REFERENCE TO RELATED APPLICATIONS

[0001] This application claims the benefit of U.S. Provisional Applications Nos. 63/184,202 filed May 4, 2021, 63/184,453 filed May 5, 2021, 63/228,645 filed Aug. 3, 2021, 63/233,701 filed Aug. 16, 2021, 63/233,690 filed Aug. 16, 2021, 63/233,688 filed Aug. 16, 2021, 63/270,895 filed Oct. 22, 2021, 63/275,269 filed Nov. 3, 2021, 63/297,518 filed Jan. 7, 2022, and 63/321,890 filed Mar. 21, 2022. The entirety of each of the priority applications is incorporated herein by reference.

### BACKGROUND

[0002] Various therapeutic approaches for treatment of cancer exist, such as the use of genetically engineered cell therapies. However, engineered cells can exhibit limited tumor cell killing and/or limited persistence. There remains a need for engineered cell therapies for effective treatment of cancer.

### SUMMARY

[0003] Some aspects of the present disclosure are based, at least in part, on methods and systems for genetically modifying NK cells and/or pluripotent stem cells (e.g., iPSCs) that are, e.g., differentiated into modified iNK cells, to include one or more gain-of-function modifications (e.g., one or more gain-of-function modifications described herein), and optionally to include one or more loss-of-function modifications (e.g., one or more loss-of-function modifications described herein), as well as modified NK cells and/or modified pluripotent stem cells (e.g., iPSCs) that are, e.g., differentiated into modified iNK cells (and compositions of such cells) that include one or more gain-of-function modifications (e.g., one or more gain-of-function modifications described herein), and optionally that include one or more loss-of-function modifications (e.g., one or more loss-of-function modifications described herein). In certain aspects of the disclosure, such modified NK cells and/or modified pluripotent stem cells (e.g., iPSCs) that are, e.g., differentiated into modified iNK cells, include at least one gain-of-function modification within a coding region of an essential gene (e.g., an essential gene described herein).

[0004] In one aspect, the disclosure features a Natural Killer (NK) cell (or a progeny or daughter cell of such NK cell, or a population of such NK cells) comprising: (a) one or more genomic edits that results in loss of function of one or more of gene products; and/or (b) a genome comprising an exogenous coding sequence, wherein the exogenous coding sequence is in frame with and downstream (3′) of a coding sequence of an essential gene, and wherein at least part of the essential gene comprises an exogenous coding sequence.

[0005] In some embodiments, the one or more genomic edits results in loss of function of one or more of: adenosine A2a receptor (ADORA2A), β-2 microglobulin (B2M), class II major histocompatibility complex transactivator (CIITA), cytokine inducible SH2 containing protein (CISH), two or more human leukocyte antigen (HLA) class II histocompatibility antigen alpha chain genes, two or more HLA class II histocompatibility antigen beta chain genes, natural killer group 2 member A receptor (NKG2A), programmed cell death protein 1 (PD-1), T cell immunoreceptor with Ig and ITIM domains (TIGIT), an agonist of the TGF beta signaling pathway (e.g., transforming growth factor beta receptor II (TGFβRII)), or any combination of two or more thereof.

[0006] In some embodiments, the exogenous coding sequence encodes (i) FcγRIII (CD16) or variant thereof and/or (ii) a membrane bound interleukin 15 (mbIL-15).

[0007] In some embodiments, the genome comprises a first exogenous coding sequence and a second exogenous coding sequence. In some embodiments, the first exogenous coding sequence encodes FcγRIII (CD16) or variant thereof. In some embodiments, the second exogenous coding sequence encodes mbIL-15. In some embodiments, the first exogenous coding sequence encodes FcγRIII (CD16) or variant thereof and the second exogenous coding sequence encodes mbIL-15.

[0008] In some embodiments, the genome comprises: (i) the first exogenous coding sequence and the second exogenous coding sequence at a first allele of the essential gene; and (ii) the first exogenous coding sequence and the second exogenous coding sequence at a second allele of the essential gene.

[0009] In some embodiments, the first exogenous coding sequence is upstream (5′) of the second exogenous coding sequence. In some embodiments, the genome comprises: (i) a first regulatory element between the coding sequence of the essential gene and the first exogenous coding sequence; and (ii) a second regulatory element between the first exogenous coding sequence and the second exogenous coding sequence. In some embodiments, the first regulatory element is an IRES or 2A element and the second regulatory element is an IRES or 2A element. In some embodiments, the genome comprises a polyadenylation sequence downstream (3′) of the second exogenous coding sequence. In some embodiments, the genome comprises a 3′ untranslated region (UTR) sequence downstream (3′) of the second exogenous coding sequence and upstream (5′) of the polyadenylation sequence.

[0010] In some embodiments, the second exogenous coding sequence is upstream (5′) of the first exogenous coding sequence. In some embodiments, the genome comprises: (i) a first regulatory element between the coding sequence of the essential gene and the second exogenous coding sequence; and (ii) a second regulatory element between the second exogenous coding sequence and the first exogenous coding sequence. In some embodiments, the first regulatory element is an IRES or 2A element and the second regulatory element is an IRES or 2A element. In some embodiments, the genome comprises a polyadenylation sequence downstream (3′) of the first exogenous coding sequence. In some embodiments, the genome comprises a 3′ untranslated region (UTR) sequence downstream (3′) of the first exogenous coding sequence and upstream (5′) of the polyadenylation sequence.

[0011] In some embodiments, the first exogenous coding sequence is or comprises SEQ ID NO: 166. In some embodiments, the second exogenous coding sequence is or comprises SEQ ID NO: 172. In some embodiments, the CD16 is or comprises the amino acid sequence of SEQ ID NO: 184. In some embodiments, the mbIL-15 comprises an IL-15, a linker, a sushi domain, and an IL-15Rα. In some embodiments, the mbIL-15 is or comprises the amino acid sequence of SEQ ID NO: 190.

[0012] In some embodiments, the NK cell is an induced pluripotent stem cell (iPSC)-derived NK (INK) cell.

[0013] In some embodiments, the essential gene encodes a gene product that is required for survival and/or proliferation of the cell. In some embodiments, the essential gene is a housekeeping gene, e.g., a gene listed in Table 3. In some embodiments, the essential gene encodes glyceraldehyde 3-phosphate dehydrogenase (GAPDH).

[0014] In some embodiments, the NK cell comprises: (i) a genomic edit that results in loss of function of CISH; and (ii) a genomic edit that results in loss of function of TGFβRII.

[0015] In some embodiments, the NK cell is for use as a medicament. In some embodiments, the NK cell is for use in the treatment of a disease, disorder, or condition, e.g., a tumor and/or a cancer.

[0016] In some embodiments, the NK cell or population of NK cells is characterized in that, when contacted with tumor cells, a level of killing of tumor cells by the NK cells is increased (e.g., by at least about 10%, 20%, 40%, 60%, 80%, 100%, 150%, 200%, 300%, or more) relative to a reference level of killing of tumor cells by a reference population of NK cells, e.g., as measured using any known method, e.g., a method described in Example 11 or Example 15.

[0017] In some embodiments, the NK cell or population of NK cells is characterized in that, when contacted with tumor cells and an antibody, a level of antibody-dependent cellular cytotoxicity (ADCC) induced by the NK cells is increased (e.g., by at least about 10%, 20%, 40%, 60%, 80%, 100%, 150%, 200%, 300%, or more) relative to a reference level of ADCC induced by a reference population of NK cells, e.g., as measured using any known method, e.g., a method described in Example 11 or Example 15.

[0018] In some embodiments, a level of persistence of the population of NK cells is increased (e.g., by at least about 10%, 20%, 40%, 60%, 80%, 100%, 150%, 200%, 300%, or more) relative to a reference level of persistence of a reference population of NK cells, e.g., as measured using any known method, e.g., a method described in Example 14 or Example 15. In some embodiments, the level of persistence is measured following contacting with tumor cells.

[0019] In some embodiments, the reference population of NK cells does not comprise NK cells comprising a genome comprising the first exogenous coding sequence and the second exogenous coding sequence. In some embodiments, the reference population of NK cell does not comprise NK cells comprising a genomic edit that results in loss of function of TGFβRII and a genomic edit that results in loss of function of CISH. In some embodiments, the reference population of NK cells does not comprise NK cells comprising a genome comprising the first exogenous coding sequence and the second exogenous coding sequence, and does not comprise NK cells comprising a genomic edit that results in loss of function of TGFβRII and a genomic edit that results in loss of function of CISH.

[0020] In some aspects, the disclosure provides a pharmaceutical composition comprising an NK cell, the progeny or daughter cell, or a population of NK cells described herein. In some embodiments, the pharmaceutical composition comprises a pharmaceutically acceptable carrier.

[0021] In another aspect, the disclosure provides methods of treating a condition, disorder, and/or disease, comprising administering to a subject suffering therefrom an NK cell, a progeny or daughter cell, or a population of NK cells described herein, or a pharmaceutical composition described herein. In some embodiments, the subject is suffering from a tumor, e.g., a solid tumor. In some embodiments, the subject is suffering from a cancer.

[0022] In some embodiments, the NK cell, the progeny or daughter cell, or the population of NK cells is allogenic to the subject. In some embodiments, the NK cell, the progeny or daughter cell, or the population of NK cells is autologous to the subject. In some embodiments, the method further comprises administering an antibody to the subject. In some embodiments, the antibody is trastuzumab, rituximab, or cetuximab. In some embodiments, the subject is a human.

[0023] In another aspect, the disclosure features a method, comprising administering to a subject an NK cell, a progeny or daughter cell, or a population of NK cells described herein, or a pharmaceutical composition described herein. In some embodiments, the subject is suffering from a tumor, e.g., a solid tumor. In some embodiments, the subject is suffering from a cancer.

[0024] In some embodiments, the NK cell, the progeny or daughter cell, or the population of NK cells is allogenic to the subject. In some embodiments, the NK cell, the progeny or daughter cell, or the population of NK cells is autologous to the subject. In some embodiments, the method further comprises administering an antibody to the subject. In some embodiments, the antibody is trastuzumab, rituximab, or cetuximab. In some embodiments, the subject is a human.

[0025] In another aspect, the disclosure provides a method of increasing tumor killing ability of a NK cell, the method comprising: (a) knocking-into the genome of the NK cell a first exogenous coding sequence for FcγRIII (CD16) or variant thereof and a second exogenous coding sequence for a membrane bound interleukin 15 (mbIL-15), wherein the first exogenous coding sequence and the second exogenous coding sequence are knocked-in in frame and downstream (3′) of an essential gene; and (b) knocking-out one or more genes of the NK cell, wherein the one or more genes encode adenosine A2a receptor (ADORA2A), β-2 microglobulin (B2M), class II major histocompatibility complex transactivator (CIITA), cytokine inducible SH2 containing protein (CISH), two or more human leukocyte antigen (HLA) class II histocompatibility antigen alpha chain genes, two or more HLA class II histocompatibility antigen beta chain genes, natural killer group 2 member A receptor (NKG2A), programmed cell death protein 1 (PD-1), T cell immunoreceptor with Ig and ITIM domains (TIGIT), an agonist of the TGF beta signaling pathway (e.g., transforming growth factor beta receptor II (TGFβRII)), or any combination of two or more thereof; thereby increasing a level of tumor killing activity of the NK cell (e.g., by at least about 10%, 20%, 40%, 60%, 80%, 100%, 150%, 200%, 300%, or more) relative to a reference level of tumor killing activity of a reference NK cell, e.g., as measured using any known method, e.g., a method described in Example 11 or Example 15.

[0026] In some embodiments, the reference NK cell does not comprise a genome comprising the first exogenous coding sequence and the second exogenous coding sequence. In some embodiments, the reference NK cell does not comprise a genomic edit that results in loss of function of TGFβRII and a genomic edit that results in loss of function of CISH. In some embodiments, the reference NK cell does not comprise a genome comprising the first exogenous coding sequence and the second exogenous coding sequence, and does not comprise a genomic edit that results in loss of function of TGFβRII and a genomic edit that results in loss of function of CISH.

[0027] In another aspect, the disclosure provides a method of increasing antibody-dependent cellular cytotoxicity (ADCC) induced by a NK cell, the method comprising: (a) knocking-into the genome of the NK cell a first exogenous coding sequence for FcγRIII (CD16) or variant thereof and a second exogenous coding sequence for a membrane bound interleukin 15 (mbIL-15), wherein the first exogenous coding sequence and the second exogenous coding sequence are knocked-in in frame and downstream (3′) of an essential gene; and (b) knocking-out one or more genes of the NK cell, wherein the one or more genes encode adenosine A2a receptor (ADORA2A), β-2 microglobulin (B2M), class II major histocompatibility complex transactivator (CIITA), cytokine inducible SH2 containing protein (CISH), two or more human leukocyte antigen (HLA) class II histocompatibility antigen alpha chain genes, two or more HLA class II histocompatibility antigen beta chain genes, natural killer group 2 member A receptor (NKG2A), programmed cell death protein 1 (PD-1), T cell immunoreceptor with Ig and ITIM domains (TIGIT), an agonist of the TGF beta signaling pathway (e.g., transforming growth factor beta receptor II (TGFβRII)), or any combination of two or more thereof; thereby increasing a level of ADCC induced by the NK cell (e.g., by at least about 10%, 20%, 40%, 60%, 80%, 100%, 150%, 200%, 300%, or more) relative to a reference level of ADCC induced by a reference NK cell, e.g., as measured using any known method, e.g., a method described in Example 11 or Example 15.

[0028] In some embodiments, the reference NK cell does not comprise a genome comprising the first exogenous coding sequence and the second exogenous coding sequence. In some embodiments, the reference NK cell does not comprise a genomic edit that results in loss of function of TGFβRII and a genomic edit that results in loss of function of CISH. In some embodiments, the reference NK cell does not comprise a genome comprising the first exogenous coding sequence and the second exogenous coding sequence, and does not comprise a genomic edit that results in loss of function of TGFβRII and a genomic edit that results in loss of function of CISH.

[0029] In another aspect, the disclosure provides a method of increasing persistence of a NK cell, the method comprising: (a) knocking-into the genome of the NK cell a first exogenous coding sequence for FcγRIII (CD16) or variant thereof and a second exogenous coding sequence for a membrane bound interleukin 15 (mbIL-15), wherein the first exogenous coding sequence and the second exogenous coding sequence are knocked-in in frame and downstream (3′) of an essential gene; and (b) knocking-out one or more genes of the NK cell, wherein the one or more genes encode adenosine A2a receptor (ADORA2A), β-2 microglobulin (B2M), class II major histocompatibility complex transactivator (CIITA), cytokine inducible SH2 containing protein (CISH), two or more human leukocyte antigen (HLA) class II histocompatibility antigen alpha chain genes, two or more HLA class II histocompatibility antigen beta chain genes, natural killer group 2 member A receptor (NKG2A), programmed cell death protein 1 (PD-1), T cell immunoreceptor with Ig and ITIM domains (TIGIT), an agonist of the TGF beta signaling pathway (e.g., transforming growth factor beta receptor II (TGFβRII)), or any combination of two or more thereof; thereby increasing a level of persistence of the NK cell (e.g., by at least about 10%, 20%, 40%, 60%, 80%, 100%, 150%, 200%, 300%, or more) relative to a reference level of persistence of a reference NK cell, e.g., as measured using any known method, e.g., a method described in Example 14 or Example 15. In some embodiments, the level of persistence is measured following contacting the NK cell with tumor cells.

[0030] In some embodiments, the reference NK cell does not comprise a genome comprising the first exogenous coding sequence and the second exogenous coding sequence. In some embodiments, the reference NK cell does not comprise a genomic edit that results in loss of function of TGFβRII and a genomic edit that results in loss of function of CISH. In some embodiments, the reference NK cell does not comprise a genome comprising the first exogenous coding sequence and the second exogenous coding sequence, and does not comprise a genomic edit that results in loss of function of TGFβRII and a genomic edit that results in loss of function of CISH.

[0031] In another aspect, the disclosure features a method of manufacturing a genetically modified NK cell, the method comprising: (a) knocking-into the genome of an NK cell a first exogenous coding sequence for FcγRIII (CD16) or variant thereof and a second exogenous coding sequence for a membrane bound interleukin 15 (mbIL-15), wherein the first exogenous coding sequence and the second exogenous coding sequence are knocked-in in frame and downstream (3′) of an essential gene; and (b) knocking-out one or more genes of the NK cell, wherein the one or more genes encode adenosine A2a receptor (ADORA2A), β-2 microglobulin (B2M), class II major histocompatibility complex transactivator (CIITA), cytokine inducible SH2 containing protein (CISH), two or more human leukocyte antigen (HLA) class II histocompatibility antigen alpha chain genes, two or more HLA class II histocompatibility antigen beta chain genes, natural killer group 2 member A receptor (NKG2A), programmed cell death protein 1 (PD-1), T cell immunoreceptor with Ig and ITIM domains (TIGIT), an agonist of the TGF beta signaling pathway (e.g., transforming growth factor beta receptor II (TGFβRII)), or any combination of two or more thereof.

[0032] In some embodiments, knocking-in comprises contacting the NK cell with: (i) a nuclease that causes a break within an endogenous coding sequence of the essential gene, and (ii) a donor template that comprises a knock-in cassette comprising the first exogenous coding sequence and the second exogenous coding sequence in frame with and downstream (3′) of an exogenous coding sequence or partial coding sequence of the essential gene, wherein the knock-in cassette is integrated into the genome of the cell by homology-directed repair (HDR) of the break.

[0033] In some embodiments, the nuclease is a CRISPR/Cas nuclease and knocking-in further comprises contacting the NK cell with a guide molecule for the CRISPR/Cas nuclease.

[0034] In some embodiments, knocking-out comprises contacting the NK cell with one or more nucleases that cause a break within an endogenous coding sequence of the one or more genes. In some embodiments, the one or more nucleases are CRISPR/Cas nucleases and knocking-out further comprises contacting the NK cell with one or more guide molecules for the CRISPR/Cas nuclease.

[0035] In some embodiments, the NK cell is an induced pluripotent stem cell (iPSC)-derived NK (iNK) cell.

[0036] In some embodiments, the essential gene encodes a gene product that is required for survival and/or proliferation of the NK cell. In some embodiments, the essential gene is a housekeeping gene, e.g., a gene listed in Table 3. In some embodiments, the essential gene encodes glyceraldehyde 3-phosphate dehydrogenase (GAPDH).

[0037] In some embodiments, the method comprises knocking-out a gene encoding CISH and knocking-out a gene encoding TGFβRII.

[0038] In one aspect, the disclosure features an NK cell, a pluripotent human stem cell, or a modified iNK cell differentiated from such stem cell, wherein the cell comprises: (i) one or more genomic edits that results in loss of function of one or more of adenosine A2a receptor (ADORA2A), β-2 microglobulin (B2M), class II major histocompatibility complex transactivator (CIITA), cytokine inducible SH2 containing protein (CISH), two or more human leukocyte antigen (HLA) class II histocompatibility antigen alpha chain genes, two or more HLA class II histocompatibility antigen beta chain genes, natural killer group 2 member A receptor (NKG2A), programmed cell death protein 1 (PD-1), T cell immunoreceptor with Ig and ITIM domains (TIGIT), an agonist of the TGF beta signaling pathway (e.g., transforming growth factor beta receptor II (TGFβRII)), or any combination of two or more thereof; and (ii) a genome comprising a first exogenous coding sequence for FcγRIII (CD16) or variant thereof and a second exogenous coding sequence for a membrane bound interleukin 15 (mbIL-15), wherein the first exogenous coding sequence and second exogenous coding sequence are in frame with and downstream (3′) of a coding sequence of an essential gene, e.g., the GAPDH gene, wherein at least part of the coding sequence of the essential gene, e.g., the GAPDH gene comprises an exogenous coding sequence.

[0039] In one aspect, the disclosure features an NK cell, a pluripotent human stem cell, or a modified iNK cell differentiated from such stem cell, wherein the cell comprises: (i) a genome a first exogenous coding sequence for FcγRIII (CD16) or variant thereof and a second exogenous coding sequence for a membrane bound interleukin 15 (mbIL-15), wherein the first exogenous coding sequence and second exogenous coding sequence are in frame with and downstream (3′) of a coding sequence of an essential gene, e.g., the GAPDH gene, wherein at least part of the coding sequence of the essential gene, e.g., the GAPDH gene, comprises an exogenous coding sequence; and wherein the cell comprises (ii) one or more genomic edits that results in loss of function of one or more of adenosine A2a receptor (ADORA2A), β-2 microglobulin (B2M), class II major histocompatibility complex transactivator (CIITA), cytokine inducible SH2 containing protein (CISH), two or more human leukocyte antigen (HLA) class II histocompatibility antigen alpha chain genes, two or more HLA class II histocompatibility antigen beta chain genes, natural killer group 2 member A receptor (NKG2A), programmed cell death protein 1 (PD-1), T cell immunoreceptor with Ig and ITIM domains (TIGIT), an agonist of the TGF beta signaling pathway (e.g., transforming growth factor beta receptor II (TGFβRII)), or any combination of two or more thereof.

[0040] In some embodiments, the cell comprises a genomic edit that results in a loss of function of an agonist of the TGF beta signaling pathway and a genomic edit that results in a loss of function of CISH.

[0041] In some embodiments, the cell comprises a genomic edit that results in a loss of function of a TGF beta receptor or a dominant-negative variant of a TGF beta receptor. In some embodiments, the TGF beta receptor is a TGF beta receptor II (TGFβRII).

[0042] In some embodiments, the cell expresses one or more pluripotency markers selected from the group consisting of SSEA-3, SSEA-4, TRA-1-60, TRA-1-81, TRA-2-49/6E, ALP, Sox2, E-cadherin, UTF-1, Oct4, Rex1, and Nanog.

[0043] In some embodiments, the exogenous coding sequence of the GAPDH gene comprises about 2000, 1500, 1000, 750, 500, 400, 300, 200, 100, or 50 base pairs of the coding sequence of the GAPDH gene. In some embodiments, the exogenous coding sequence of the GAPDH gene comprises about 200 base pairs of the coding sequence of the GAPDH gene.

[0044] In some embodiments, the exogenous coding sequence of the GAPDH gene encodes a C-terminal fragment of a protein encoded by the GAPDH gene. In some embodiments, the C-terminal fragment is less than about 500, 250, 150, 125, 100, 75, 50, 25, 20, 15 or 10 amino acids in length. In some embodiments, the C-terminal fragment is less than about 25 amino acids in length. In some embodiments, the C-terminal fragment includes an amino acid sequence that is encoded by a region of the endogenous coding sequence of the GAPDH gene that spans the break.

[0045] In some embodiments, the exogenous coding sequence of the GAPDH gene is less than 100% identical to the corresponding endogenous coding sequence of the GAPDH gene of the cell. In some embodiments, the exogenous coding sequence of the GAPDH gene has been codon optimized relative to the corresponding endogenous coding sequence of the GAPDH gene of the cell to remove a target site of a nuclease, e.g., a Cas. In some embodiments, the nuclease is a Cas (e.g., Cas9, Cas12a, Cas12b, Cas12c, Cas12e, CasX, or CasΦ (Cas12j), or variants thereof), the exogenous coding sequence of the GAPDH gene includes at least one PAM site for the Cas, and the at least one PAM site (or all PAM sites) has been codon optimized or saturated with silent and/or missense mutations.

[0046] In some embodiments, the cell's genome comprises a regulatory element that enables expression of the gene product encoded by the GAPDH gene and the first and second exogenous coding sequences as separate gene products, optionally, wherein at least one of the gene products is a protein and the regulatory element enables expression of that protein separate from the other gene product. In some embodiments, the cell's genome comprises an IRES or 2A element located between the coding sequence of the GAPDH gene and the first exogenous coding sequence, and/or between the first exogenous coding sequence and the second exogenous coding sequence.

[0047] In some embodiments, the cell's genome does not comprise a reporter gene, e.g., a fluorescent reporter gene or an antibiotic resistance gene.

[0048] In another aspect, the disclosure features an NK cell, a pluripotent human stem cell, or an iNK cell differentiated from such stem cell, comprising a genomic modification, wherein the modification comprises: (i) a genomic edit that results in loss of function of Cytokine Inducible SH2 Containing Protein (CISH) and (ii) a genomic edit that results in a loss of function of an agonist of the TGF beta signaling pathway; and (iii) an insertion of an exogenous knock-in cassette within an endogenous coding sequence of a GAPDH gene in the cell's genome, wherein the knock-in cassette comprises a first exogenous coding sequence for FcγRIII (CD16) or variant thereof and a second exogenous coding sequence for a membrane bound interleukin 15 (mbIL-15), wherein the first exogenous coding sequence and second exogenous coding sequence are in frame with and downstream (3′) of an exogenous coding sequence or partial coding sequence encoding GAPDH, or a functional variant thereof, wherein the cell expresses FcγRIII (CD16) or variant thereof, mbIL-15, and GAPDH, or a functional variant thereof, optionally wherein FcγRIII (CD16) or variant thereof, mbIL-15, and GAPDH are expressed from the endogenous GAPDH promoter.

[0049] In another aspect, the disclosure features an NK cell, a pluripotent human stem cell, or an iNK cell differentiated from such stem cell, comprising a genomic modification, wherein the modification comprises: (i) an insertion of an exogenous knock-in cassette within an endogenous coding sequence of a GAPDH gene in the cell's genome, wherein the knock-in cassette comprises a first exogenous coding sequence for FcγRIII (CD16) or variant thereof and a second exogenous coding sequence for a membrane bound interleukin 15 (mbIL-15), wherein the first exogenous coding sequence and second exogenous coding sequence are in frame with and downstream (3′) of an exogenous coding sequence or partial coding sequence encoding GAPDH, or a functional variant thereof, wherein the cell expresses FcγRIII (CD16) or variant thereof, mbIL-15, and GAPDH, or a functional variant thereof, optionally wherein FcγRIII (CD16) or variant thereof, mbIL-15, and GAPDH are expressed from the endogenous GAPDH promoter, and wherein the NK cell, pluripotent human stem cell, or iNK cell differentiated from such a stem cell further comprises (ii) one or more genomic edits that results in loss of function of one or more of adenosine A2a receptor (ADORA2A), β-2 microglobulin (B2M), class II major histocompatibility complex transactivator (CIITA), cytokine inducible SH2 containing protein (CISH), two or more human leukocyte antigen (HLA) class II histocompatibility antigen alpha chain genes, two or more HLA class II histocompatibility antigen beta chain genes, natural killer group 2 member A receptor (NKG2A), programmed cell death protein 1 (PD-1), T cell immunoreceptor with Ig and ITIM domains (TIGIT), an agonist of the TGF beta signaling pathway (e.g., transforming growth factor beta receptor II (TGFβRII)), or any combination of two or more thereof.

[0050] In some embodiments, the cell comprises a genomic edit that results in a loss of function of an agonist of the TGF beta signaling pathway and a genomic edit that results in a loss of function of CISH.

[0051] In some embodiments, the cell comprises a genomic edit that results in a loss of function of a TGF beta receptor or a dominant-negative variant of a TGF beta receptor. In some embodiments, the TGF beta receptor is a TGF beta receptor II (TGFβRII).

[0052] In some embodiments, the cell expresses one or more pluripotency markers selected from the group consisting of SSEA-3, SSEA-4, TRA-1-60, TRA-1-81, TRA-2-49/6E, ALP, Sox2, E-cadherin, UTF-1, Oct4, Rex1, and Nanog.

[0053] In some embodiments, the exogenous coding sequence or partial coding sequence encoding GAPDH comprises about 2000, 1500, 1000, 750, 500, 400, 300, 200, 100, or 50 base pairs of the coding sequence of the GAPDH gene. In some embodiments, the exogenous coding sequence or partial coding sequence encoding GAPDH comprises about 200 base pairs of the coding sequence of the GAPDH gene.

[0054] In some embodiments, the exogenous coding sequence or partial coding sequence encoding GAPDH encodes a C-terminal fragment of GAPDH. In some embodiments, the C-terminal fragment is less than about 500, 250, 150, 125, 100, 75, 50, 25, 20, 15 or 10 amino acids in length. In some embodiments, the C-terminal fragment is less than about 25 amino acids in length. In some embodiments, the C-terminal fragment includes an amino acid sequence that is encoded by a region of the endogenous coding sequence of the GAPDH gene that spans the break.

[0055] In some embodiments, the exogenous coding sequence or partial coding sequence encoding GAPDH is less than 100% identical to the corresponding endogenous coding sequence of the GAPDH gene of the cell. In some embodiments, the exogenous coding sequence or partial coding sequence encoding GAPDH has been codon optimized relative to the corresponding endogenous coding sequence of the GAPDH gene of the cell to remove a target site of a nuclease, e.g., a Cas. In some embodiments, the nuclease is a Cas (e.g., Cas9, Cas12a, Cas12b, Cas12c, Cas12e, CasX, CasΦ (Cas12j)), or a variant thereof), the exogenous coding sequence or partial coding sequence encoding GAPDH includes at least one PAM site for the Cas, and the at least one PAM site (or all PAM sites) has been codon optimized or saturated with silent and/or missense mutations.

[0056] In some embodiments, the cell's genome comprises a regulatory element that enables expression of the gene product encoded by the GAPDH gene and the first and second exogenous coding sequences as separate gene products, optionally, wherein at least one of the gene products is a protein and the regulatory element enables expression of that protein separate from the other gene product. In some embodiments, the cell's genome comprises an IRES or 2A element located between the coding sequence of the GAPDH gene and the first exogenous coding sequence and/or between the first exogenous coding sequence and the second exogenous coding sequence.

[0057] In some embodiments, the first exogenous coding sequence is upstream (5′) of the second exogenous coding sequence, and the cell's genome comprises a polyadenylation sequence, and optionally a 3′ UTR sequence, downstream of the second exogenous coding sequence, and, if a 3′UTR sequence is present, the 3′UTR sequence is positioned 3′ of the second exogenous coding sequence and 5′ of the polyadenylation sequence.

[0058] In some embodiments, the second exogenous coding sequence is upstream (5′) of the first exogenous coding sequence, and the cell's genome comprises a polyadenylation sequence, and optionally a 3′ UTR sequence, downstream of the first exogenous coding sequence, and, if a 3′UTR sequence is present, the 3′UTR sequence is positioned 3′ of the first exogenous coding sequence and 5′ of the polyadenylation sequence.

[0059] In some embodiments, the cell's genome does not comprise a reporter gene, e.g., a fluorescent reporter gene or an antibiotic resistance gene.

[0060] In some embodiments, the knock-in cassette comprises the first exogenous coding sequence, a linker (e.g., T2A, P2A, and/or IRES), and the second exogenous coding sequence. In some embodiments, the genome-edited cell comprises (i) knock-in cassettes at one or both alleles of the GAPDH gene; and (ii) one or more loss-of-function modifications at one or both alleles. In some embodiments, the genome-edited cell expresses FcγRIII (CD16) or variant thereof, mbIL-15, and GAPDH, or a functional variant thereof.

[0061] In some embodiments, the engineered cell comprises (i) one or more loss-of-function modifications at one or both alleles (e.g., at least one genomic edit that results in a loss of function of at least one of: CISH; TGF beta signaling pathway; ADORA2A; T cell immunoreceptor with Ig and ITIM domains (TIGIT); β-2 microglobulin (B2M); programmed cell death protein 1 (PD-1); class II, major histocompatibility complex, transactivator (CIITA); natural killer cell receptor NKG2A (natural killer group 2A); two or more HLA class II histocompatibility antigen alpha chain genes, and/or two or more HLA class II histocompatibility antigen beta chain genes; cluster of differentiation 32B (CD32B, FCGR2B); T cell receptor alpha constant (TRAC); or any combination of two or more thereof) and (ii) multi-cistronic knock-ins (e.g., at one or both alleles of GAPDH gene) of coding sequence for FcγRIII (CD16) or variant thereof and coding sequence for mbIL-15.

[0062] In some embodiments, the engineered cell comprises (i) one or more loss-of-function modifications at one or both alleles (e.g., at least one genomic edit that results in a loss of function of at least one of: CISH; TGF beta signaling pathway; ADORA2A; T cell immunoreceptor with Ig and ITIM domains (TIGIT); β-2 microglobulin (B2M); programmed cell death protein 1 (PD-1); class II, major histocompatibility complex, transactivator (CIITA); natural killer cell receptor NKG2A (natural killer group 2A); two or more HLA class II histocompatibility antigen alpha chain genes, and/or two or more HLA class II histocompatibility antigen beta chain genes; cluster of differentiation 32B (CD32B, FCGR2B); T cell receptor alpha constant (TRAC); or any combination of two or more thereof); and (ii) bi-allelic knock-ins (e.g., the first exogenous coding sequence at a first allele of GAPDH gene, and the second exogenous coding sequence at a second allele of GAPDH gene).

[0063] In some embodiments, the disclosure features a differentiated iNK cell, wherein the differentiated iNK cell is a daughter cell of a pluripotent human stem cell described herein. In some embodiments, the cell does not express endogenous CD3, CD4, and/or CD8.

[0064] In some embodiments, a genomic edit resulting in loss of function of CISH in any of the cells described herein was produced using a guide RNA comprising a targeting domain sequence comprising or consisting of the nucleotide sequence according to any one of SEQ ID NO: 258-364, 1155, 1162, and 1173. In some embodiments, a genomic edit resulting in loss of function of CISH in any of the cells described herein was produced using a guide RNA comprising a targeting domain sequence comprising or consisting of a nucleotide sequence that is identical to, or differs by no more than 1, 2, or 3 nucleotides from, any one of SEQ ID NO: 258-364, 1155, 1162, and 1173. In some embodiments, a genomic edit resulting in loss of function of CISH in any of the cells described herein was produced using a guide RNA comprising (i) a targeting domain sequence comprising or consisting of the nucleotide sequence of SEQ ID NO:1155 or 1162, and (ii) a 5′ extension sequence depicted in Table 6. In some embodiments, a genomic edit resulting in loss of function of CISH in any of the cells described herein was produced using a guide RNA comprising (i) a targeting domain sequence comprising or consisting of the nucleotide sequence of SEQ ID NO:1155 or 1162, (ii) a scaffold sequence comprising or consisting of the nucleotide sequence of SEQ ID NO: 1153 located 5′ of the targeting domain sequence, and (iii) the nucleotide sequence of SEQ ID NO: 1154 at the 5′ of the scaffold sequence.

[0065] In some embodiments, a genomic edit resulting in loss of function of TGFβRII in any of the cells described herein was produced using a guide RNA comprising a targeting domain sequence comprising or consisting of the nucleotide sequence according to any one of SEQ ID NO: 29-257, 1157, 1161, and 1172. In some embodiments, a genomic edit resulting in loss of function of TGFβRII in any of the cells described herein was produced using a guide RNA comprising a targeting domain sequence comprising or consisting of a nucleotide sequence that is identical to, or differs by no more than 1, 2, or 3 nucleotides from, any one of SEQ ID NO: 29-257, 1157, 1161, and 1172. In some embodiments, a genomic edit resulting in loss of function of TGFβRII in any of the cells described herein was produced using a guide RNA comprising (i) a targeting domain sequence comprising or consisting of the nucleotide sequence of SEQ ID NO: 1157 or 1161, and (ii) a 5′ extension sequence depicted in Table 6. In some embodiments, a genomic edit resulting in loss of function of TGFβRII in any of the cells described herein was produced using a guide RNA comprising (i) a targeting domain sequence comprising or consisting of the nucleotide sequence of SEQ ID NO: 1157 or 1161, (ii) a scaffold sequence comprising or consisting of the nucleotide sequence of SEQ ID NO: 1153 located 5′ of the targeting domain sequence, and (iii) the nucleotide sequence of SEQ ID NO: 1154 at the 5′ of the scaffold sequence.

[0066] In some embodiments, a genomic edit resulting in loss of function of CISH in any of the cells described herein was produced using a ribonucleoprotein (RNP) complex comprising (i) an RNA-guided nuclease (e.g., a Cas12a variant, e.g., a Cas12a variant comprising 1, 2, or 3 of the amino acid substitutions selected from M537R, F870L, and H800A, e.g., a Cas12a variant comprising an amino acid sequence having 90%, 95%, or 100% identity to SEQ ID NO: 62) and (ii) a guide RNA comprising a targeting domain sequence comprising or consisting of the nucleotide sequence according to any one of SEQ ID NO: 258-364, 1155, 1162, and 1173. In some embodiments, a genomic edit resulting in loss of function of CISH in any of the cells described herein was produced using a ribonucleoprotein (RNP) complex comprising (i) an RNA-guided nuclease (e.g., a Cas12a variant, e.g., a Cas12a variant comprising 1, 2, or 3 of the amino acid substitutions selected from M537R, F870L, and H800A, e.g., a Cas12a variant comprising an amino acid sequence having 90%, 95%, or 100% identity to SEQ ID NO: 62) and (ii) a guide RNA comprising a targeting domain sequence comprising or consisting of a nucleotide sequence that is identical to, or differs by no more than 1, 2, or 3 nucleotides from, any one of SEQ ID NO: 258-364, 1155, 1162, and 1173. In some embodiments, a genomic edit resulting in loss of function of CISH in any of the cells described herein was produced using a ribonucleoprotein (RNP) complex comprising (i) an RNA-guided nuclease (e.g., a Cas12a variant, e.g., a Cas12a variant comprising 1, 2, or 3 of the amino acid substitutions selected from M537R, F870L, and H800A, e.g., a Cas12a variant comprising an amino acid sequence having 90%, 95%, or 100% identity to SEQ ID NO: 62) and (ii) a guide RNA comprising (i) a targeting domain sequence comprising or consisting of the nucleotide sequence of SEQ ID NO:1155 or 1162, and (ii) a 5′ extension sequence depicted in Table 6. In some embodiments, a genomic edit resulting in loss of function of CISH in any of the cells described herein was produced using a ribonucleoprotein (RNP) complex comprising (i) an RNA-guided nuclease (e.g., a Cas12a variant, e.g., a Cas 12a variant comprising 1, 2, or 3 of the amino acid substitutions selected from M537R, F870L, and H800A, e.g., a Cas12a variant comprising an amino acid sequence having 90%, 95%, or 100% identity to SEQ ID NO: 62) and (ii) a guide RNA comprising (i) a targeting domain sequence comprising or consisting of the nucleotide sequence of SEQ ID NO:1155 or 1162, (ii) a scaffold sequence comprising or consisting of the nucleotide sequence of SEQ ID NO: 1153 located 5′ of the targeting domain sequence, and (iii) the nucleotide sequence of SEQ ID NO:1154 at the 5′ of the scaffold sequence.

[0067] In some embodiments, a genomic edit resulting in loss of function of TGFβRII in any of the cells described herein was produced using a ribonucleoprotein (RNP) complex comprising (i) an RNA-guided nuclease (e.g., a Cas12a variant, e.g., a Cas12a variant comprising 1, 2, or 3 of the amino acid substitutions selected from M537R, F870L, and H800A, e.g., a Cas12a variant comprising an amino acid sequence having 90%, 95%, or 100% identity to SEQ ID NO: 62), and (ii) a guide RNA comprising a targeting domain sequence comprising or consisting of the nucleotide sequence according to any one of SEQ ID NO: 29-257, 1157, 1161, and 1172. In some embodiments, a genomic edit resulting in loss of function of TGFβRII in any of the cells described herein was produced using a ribonucleoprotein (RNP) complex comprising (i) an RNA-guided nuclease (e.g., a Cas12a variant, e.g., a Cas12a variant comprising 1, 2, or 3 of the amino acid substitutions selected from M537R, F870L, and H800A, e.g., a Cas12a variant comprising an amino acid sequence having 90%, 95%, or 100% identity to SEQ ID NO: 62) and (ii) a guide RNA comprising a targeting domain sequence comprising or consisting of a nucleotide sequence that is identical to, or differs by no more than 1, 2, or 3 nucleotides from, any one of SEQ ID NO: 29-257, 1157, 1161, and 1172. In some embodiments, a genomic edit resulting in loss of function of TGFβRII in any of the cells described herein was produced using a ribonucleoprotein (RNP) complex comprising (i) an RNA-guided nuclease (e.g., a Cas12a variant, e.g., a Cas 12a variant comprising 1, 2, or 3 of the amino acid substitutions selected from M537R, F870L, and H800A, e.g., a Cas12a variant comprising an amino acid sequence having 90%, 95%, or 100% identity to SEQ ID NO: 62), and (ii) a guide RNA comprising (i) a targeting domain sequence comprising or consisting of the nucleotide sequence of SEQ ID NO: 1157 or 1161, and (ii) a 5′ extension sequence depicted in Table 6. In some embodiments, a genomic edit resulting in loss of function of TGFβRII in any of the cells described herein was produced using a ribonucleoprotein (RNP) complex comprising (i) an RNA-guided nuclease (e.g., a Cas12a variant, e.g., a Cas12a variant comprising 1, 2, or 3 of the amino acid substitutions selected from M537R, F870L, and H800A, e.g., a Cas12a variant comprising an amino acid sequence having 90%, 95%, or 100% identity to SEQ ID NO: 62), and (ii) a guide RNA comprising (i) a targeting domain sequence comprising or consisting of the nucleotide sequence of SEQ ID NO: 1157 or 1161, (ii) a scaffold sequence comprising or consisting of the nucleotide sequence of SEQ ID NO: 1153 located 5′ of the targeting domain sequence, and (iii) the nucleotide sequence of SEQ ID NO: 1154 at the 5′ of the scaffold sequence.

[0068] In another aspect, the disclosure features a method of making a cell, e.g., a cell described herein, the method comprising (A) contacting an NK cell, a pluripotent human stem cell or human induced pluripotent stem cell, with: an RNA-guided nuclease and a guide RNA comprising a targeting domain sequence comprising or consisting of a nucleotide sequence that is identical to, or differs by no more than 1, 2, or 3 nucleotides from, any one of 258-364, 1155, 1162, and 1173; and an RNA-guided nuclease and a guide RNA comprising a targeting domain sequence comprising or consisting of a nucleotide sequence that is identical to, or differs by no more than 1, 2, or 3 nucleotides from, any one of 29-257, 1157, 1161, and 1172; and (B) contacting the cell with: (i) a nuclease that causes a break within an endogenous coding sequence of a glyceraldehyde 3-phosphate dehydrogenase (GAPDH) gene in the cell, and (ii) a donor template that comprises a knock-in cassette comprising a first exogenous coding sequence for FcγRIII (CD16) or variant thereof and a second exogenous coding sequence for a membrane bound interleukin 15 (mbIL-15), wherein the first exogenous coding sequence and second exogenous coding sequence are in frame with and downstream (3′) of an exogenous coding sequence or partial coding sequence of the GAPDH gene, wherein the knock-in cassette is integrated into the genome of the cell by homology-directed repair (HDR) of the break, resulting in a genome-edited cell that expresses: (a) FcγRIII (CD16) or variant thereof, (b) mbIL-15, and (c) GAPDH, or a functional variant thereof.

[0069] In some embodiments, the method comprises contacting the cell with: (1) a guide RNA comprising (i) a targeting domain sequence comprising or consisting of the nucleotide sequence of SEQ ID NO:1155 or 1162, and (ii) a 5′ extension sequence depicted in Table 6; and (2) a guide RNA comprising (i) a targeting domain sequence comprising or consisting of the nucleotide sequence of SEQ ID NO: 1157 or 1161, and (ii) a 5′ extension sequence depicted in Table 6.

[0070] In some embodiments, the method comprises contacting the cell with: (1) a guide RNA comprising (i) a targeting domain sequence comprising or consisting of the nucleotide sequence of SEQ ID NO:1155 or 1162, (ii) a scaffold sequence comprising or consisting of the nucleotide sequence of SEQ ID NO: 1153 located 5′ of the targeting domain sequence, and (iii) the nucleotide sequence of SEQ ID NO: 1154 at the 5′ of the scaffold sequence; and (2) a guide RNA comprising (i) a targeting domain sequence comprising or consisting of the nucleotide sequence of SEQ ID NO: 1157 or 1161, (ii) a scaffold sequence comprising or consisting of the nucleotide sequence of SEQ ID NO: 1153 located 5′ of the targeting domain sequence, and (iii) the nucleotide sequence of SEQ ID NO: 1154 at the 5′ of the scaffold sequence.

[0071] In some embodiments, the RNA-guided nuclease is a Cas12a variant. In some embodiments, the Cas12a variant comprises one or more amino acid substitutions selected from M537R, F870L, and H800A. In some embodiments, the Cas12a variant comprises amino acid substitutions M537R, F870L, and H800A. In some embodiments, the Cas12a variant comprises an amino acid sequence having 90%, 95%, or 100% identity to SEQ ID NO: 62.

[0072] In another aspect, the disclosure features a method of making a cell, e.g., a cell described herein, the method comprising (A) contacting an NK cell, a pluripotent human stem cell or a human induced pluripotent stem cell, with: a ribonucleoprotein (RNP) complex comprising (i) an RNA-guided nuclease (e.g., a Cas12a variant, e.g., a Cas12a variant comprising 1, 2, or 3 of the amino acid substitutions selected from M537R, F870L, and H800A, e.g., a Cas12a variant comprising an amino acid sequence having 90%, 95%, or 100% identity to SEQ ID NO: 62) and (ii) a guide RNA comprising a targeting domain sequence comprising or consisting of a nucleotide sequence that is identical to, or differs by no more than 1, 2, or 3 nucleotides from, any one of SEQ ID NO: 258-364, 1155, 1162, and 1173; and a ribonucleoprotein (RNP) complex comprising (i) an RNA-guided nuclease (e.g., a Cas12a variant, e.g., a Cas12a variant comprising 1, 2, or 3 of the amino acid substitutions selected from M537R, F870L, and H800A, e.g., a Cas12a variant comprising an amino acid sequence having 90%, 95%, or 100% identity to SEQ ID NO: 62) and (ii) a guide RNA comprising a targeting domain sequence comprising or consisting of a nucleotide sequence that is identical to, or differs by no more than 1, 2, or 3 nucleotides from, any one of SEQ ID NO: 29-257, 1157, 1161, and 1172; and (B) contacting the cell with: (i) a nuclease that causes a break within an endogenous coding sequence of a glyceraldehyde 3-phosphate dehydrogenase (GAPDH) gene in the cell, and (ii) a donor template that comprises a knock-in cassette comprising a first exogenous coding sequence for FcγRIII (CD16) or variant thereof and a second exogenous coding sequence for a membrane bound interleukin 15 (mbIL-15), wherein the first exogenous coding sequence and second exogenous coding sequence are in frame with and downstream (3′) of an exogenous coding sequence or partial coding sequence of the GAPDH gene, wherein the knock-in cassette is integrated into the genome of the cell by homology-directed repair (HDR) of the break, resulting in a genome-edited cell that expresses: (a) FcγRIII (CD16) or variant thereof, (b) mbIL-15, and (c) GAPDH, or a functional variant thereof.

[0073] In some embodiments, the method comprises contacting the cell with: (1) an RNP comprising a guide RNA comprising (i) a targeting domain sequence comprising or consisting of the nucleotide sequence of SEQ ID NO: 1155 or 1162, and (ii) a 5′ extension sequence depicted in Table 6; and (2) an RNP comprising a guide RNA comprising (i) a targeting domain sequence comprising or consisting of the nucleotide sequence of SEQ ID NO: 1157 or 1161, and (ii) a 5′ extension sequence depicted in Table 6.

[0074] In some embodiments, the method comprises contacting the cell with: (1) an RNP comprising a guide RNA comprising (i) a targeting domain sequence comprising or consisting of the nucleotide sequence of SEQ ID NO: 1155 or 1162, (ii) a scaffold sequence comprising or consisting of the nucleotide sequence of SEQ ID NO: 1153 located 5′ of the targeting domain sequence, and (iii) the nucleotide sequence of SEQ ID NO: 1154 at the 5′ of the scaffold sequence; and (2) an RNP comprising a guide RNA comprising (i) a targeting domain sequence comprising or consisting of the nucleotide sequence of SEQ ID NO: 1157 or 1161, (ii) a scaffold sequence comprising or consisting of the nucleotide sequence of SEQ ID NO: 1153 located 5′ of the targeting domain sequence, and (iii) the nucleotide sequence of SEQ ID NO:1154 at the 5′ of the scaffold sequence.

[0075] In some embodiments, the RNA-guided nuclease is a Cas12a variant. In some embodiments, the Cas12a variant comprises one or more amino acid substitutions selected from M537R, F870L, and H800A. In some embodiments, the Cas12a variant comprises amino acid substitutions M537R, F870L, and H800A. In some embodiments, the Cas12a variant comprises an amino acid sequence having 90%, 95%, or 100% identity to SEQ ID NO: 62.

[0076] In another aspect, the disclosure features a method of making a cell, e.g., a cell described herein, the method comprising (A) contacting an NK cell, a pluripotent human stem cell or a human induced pluripotent stem cell, with (i) a guide RNA comprising a targeting domain sequence comprising or consisting of the nucleotide sequence of SEQ ID NO: 1155 or 1162; and a guide RNA comprises a targeting domain sequence comprising or consisting of the nucleotide sequence of SEQ ID NO: 1157 or 1161; and (ii) an RNA-guided nuclease comprising an amino acid sequence having 90%, 95%, or 100% identity to one of SEQ ID NO:58-66 (or a portion thereof); and (B) contacting the cell with: (i) a nuclease that causes a break within an endogenous coding sequence of a glyceraldehyde 3-phosphate dehydrogenase (GAPDH) gene in the cell, and (ii) a donor template that comprises a knock-in cassette comprising a first exogenous coding sequence for FcγRIII (CD16) or variant thereof and a second exogenous coding sequence for a membrane bound interleukin 15 (mbIL-15), wherein the first exogenous coding sequence and second exogenous coding sequence are in frame with and downstream (3′) of an exogenous coding sequence or partial coding sequence of the GAPDH gene, wherein the knock-in cassette is integrated into the genome of the cell by homology-directed repair (HDR) of the break, resulting in a genome-edited cell that expresses: (a) FcγRIII (CD16) or variant, (b) mbIL-15, and (c) GAPDH, or a functional variant thereof.

[0077] In another aspect, the disclosure features a method of making a cell, e.g., a cell described herein, the method comprising (A) contacting an NK cell, a pluripotent human stem cell or a human induced pluripotent stem cell, with (1) an RNP comprising (i) a guide RNA comprising a targeting domain sequence comprising or consisting of the nucleotide sequence of SEQ ID NO: 1155 or 1162; and (ii) an RNA-guided nuclease comprising an amino acid sequence having 90%, 95%, or 100% identity to one of SEQ ID NO:58-66 (or a portion thereof); and (2) an RNP comprising (i) a guide RNA comprises a targeting domain sequence comprising or consisting of the nucleotide sequence of SEQ ID NO: 1157 or 1161, and (ii) an RNA-guided nuclease comprising an amino acid sequence having 90%, 95%, or 100% identity to one of SEQ ID NO:58-66 (or a portion thereof); and (B) contacting the cell with: (i) a nuclease that causes a break within an endogenous coding sequence of a glyceraldehyde 3-phosphate dehydrogenase (GAPDH) gene in the cell, and (ii) a donor template that comprises a knock-in cassette comprising a first exogenous coding sequence for FcγRIII (CD16) or variant thereof and a second exogenous coding sequence for a membrane bound interleukin 15 (mbIL-15), wherein the first exogenous coding sequence and second exogenous coding sequence are in frame with and downstream (3′) of an exogenous coding sequence or partial coding sequence of the GAPDH gene, wherein the knock-in cassette is integrated into the genome of the cell by homology-directed repair (HDR) of the break, resulting in a genome-edited cell that expresses: (a) FcγRIII (CD16) or variant thereof, (b) mbIL-15, and (c) GAPDH, or a functional variant thereof.

[0078] In another aspect, the disclosure features a method of making a cell, e.g., a cell described herein, the method comprising (A) contacting an NK cell, a pluripotent human stem cell or a human induced pluripotent stem cell, with (1) a guide RNA comprising (i) a targeting domain sequence comprising or consisting of the nucleotide sequence of SEQ ID NO:1155 or 1162, and (ii) a 5′ extension sequence depicted in Table 6; (2) a guide RNA comprising (i) a targeting domain sequence comprising or consisting of the nucleotide sequence of SEQ ID NO: 1157 or 1161, and (ii) a 5′ extension sequence depicted in Table 6; and (3) an RNA-guided nuclease comprising an amino acid sequence having 90%, 95%, or 100% identity to one of SEQ ID NO:58-66 (or a portion thereof); and (B) contacting the cell with: (i) a nuclease that causes a break within an endogenous coding sequence of a glyceraldehyde 3-phosphate dehydrogenase (GAPDH) gene in the cell, and (ii) a donor template that comprises a knock-in cassette comprising a first exogenous coding sequence for FcγRIII (CD16) or variant thereof and a second exogenous coding sequence for a membrane bound interleukin 15 (mbIL-15), wherein the first exogenous coding sequence and second exogenous coding sequence are in frame with and downstream (3′) of an exogenous coding sequence or partial coding sequence of the GAPDH gene, wherein the knock-in cassette is integrated into the genome of the cell by homology-directed repair (HDR) of the break, resulting in a genome-edited cell that expresses: (a) FcγRIII (CD16) or variant thereof, (b) mbIL-15, and (c) GAPDH, or a functional variant thereof.

[0079] In another aspect, the disclosure features a method of making a cell, e.g., a cell described herein, the method comprising (A) contacting an NK cell, a pluripotent human stem cell or a human induced pluripotent stem cell, with (1) an RNP comprising (a) a guide RNA comprising (i) a targeting domain sequence comprising or consisting of the nucleotide sequence of SEQ ID NO:1155 or 1162, and (ii) a 5′ extension sequence depicted in Table 6; and (b) an RNA-guided nuclease comprising an amino acid sequence having 90%, 95%, or 100% identity to one of SEQ ID NO:58-66 (or a portion thereof); and (2) an RNP comprising (a) a guide RNA comprising (i) a targeting domain sequence comprising or consisting of the nucleotide sequence of SEQ ID NO: 1157 or 1161, and (ii) a 5′ extension sequence depicted in Table 6; and (b) an RNA-guided nuclease comprising an amino acid sequence having 90%, 95%, or 100% identity to one of SEQ ID NO:58-66 (or a portion thereof); and (B) contacting the cell with: (i) a nuclease that causes a break within an endogenous coding sequence of a glyceraldehyde 3-phosphate dehydrogenase (GAPDH) gene in the cell, and (ii) a donor template that comprises a knock-in cassette comprising a first exogenous coding sequence for FcγRIII (CD16) or variant thereof and a second exogenous coding sequence for a membrane bound interleukin 15 (mbIL-15), wherein the first exogenous coding sequence and second exogenous coding sequence are in frame with and downstream (3′) of an exogenous coding sequence or partial coding sequence of the GAPDH gene, wherein the knock-in cassette is integrated into the genome of the cell by homology-directed repair (HDR) of the break, resulting in a genome-edited cell that expresses: (a) FcγRIII (CD16) or variant thereof, (b) mbIL-15, and (c) GAPDH, or a functional variant thereof.

[0080] In another aspect, the disclosure features a method of making a cell, e.g., a cell described herein, the method comprising (A) contacting an NK cell, a pluripotent human stem cell or a human induced pluripotent stem cell, with (1) a guide RNA comprising (i) a targeting domain sequence comprising or consisting of the nucleotide sequence of SEQ ID NO: 1155 or 1162, (ii) a scaffold sequence comprising or consisting of the nucleotide sequence of SEQ ID NO: 1153 located 5′ of the targeting domain sequence, and (iii) the nucleotide sequence of SEQ ID NO:1154 at the 5′ of the scaffold sequence; (2) a guide RNA comprising (i) a targeting domain sequence comprising or consisting of the nucleotide sequence of SEQ ID NO: 1157 or 1161, (ii) a scaffold sequence comprising or consisting of the nucleotide sequence of SEQ ID NO: 1153 located 5′ of the targeting domain sequence, and (iii) the nucleotide sequence of SEQ ID NO:1154 at the 5′ of the scaffold sequence; and (3) an RNA-guided nuclease comprising an amino acid sequence having 90%, 95%, or 100% identity to one of SEQ ID NO:58-66 (or a portion thereof); and (B) contacting the cell with: (i) a nuclease that causes a break within an endogenous coding sequence of a glyceraldehyde 3-phosphate dehydrogenase (GAPDH) gene in the cell, and (ii) a donor template that comprises a knock-in cassette comprising a first exogenous coding sequence for FcγRIII (CD16) or variant thereof and a second exogenous coding sequence for a membrane bound interleukin 15 (mbIL-15), wherein the first exogenous coding sequence and second exogenous coding sequence are in frame with and downstream (3′) of an exogenous coding sequence or partial coding sequence of the GAPDH gene, wherein the knock-in cassette is integrated into the genome of the cell by homology-directed repair (HDR) of the break, resulting in a genome-edited cell that expresses: (a) FcγRIII (CD16) or variant thereof, (b) mbIL-15, and (c) GAPDH, or a functional variant thereof.

[0081] In another aspect, the disclosure features a method of making a cell, e.g., a cell described herein, the method comprising (A) contacting an NK cell, a pluripotent human stem cell or a human induced pluripotent stem cell, with (1) an RNP comprising (a) a guide RNA comprising (i) a targeting domain sequence comprising or consisting of the nucleotide sequence of SEQ ID NO: 1155 or 1162, (ii) a scaffold sequence comprising or consisting of the nucleotide sequence of SEQ ID NO: 1153 located 5′ of the targeting domain sequence, and (iii) the nucleotide sequence of SEQ ID NO: 1154 at the 5′ of the scaffold sequence; and (b) an RNA-guided nuclease comprising an amino acid sequence having 90%, 95%, or 100% identity to one of SEQ ID NO:1144-1151 (or a portion thereof); and (2) an RNP comprising (a) a guide RNA comprising (i) a targeting domain sequence comprising or consisting of the nucleotide sequence of SEQ ID NO: 1157 or 1161, (ii) a scaffold sequence comprising or consisting of the nucleotide sequence of SEQ ID NO: 1153 located 5′ of the targeting domain sequence, and (iii) the nucleotide sequence of SEQ ID NO: 1154 at the 5′ of the scaffold sequence; and (b) an RNA-guided nuclease comprising an amino acid sequence having 90%, 95%, or 100% identity to one of SEQ ID NO:1144-1151 (or a portion thereof); and (B) contacting the cell with: (i) a nuclease that causes a break within an endogenous coding sequence of a glyceraldehyde 3-phosphate dehydrogenase (GAPDH) gene in the cell, and (ii) a donor template that comprises a knock-in cassette comprising a first exogenous coding sequence for FcγRIII (CD16) or variant thereof and a second exogenous coding sequence for a membrane bound interleukin 15 (mbIL-15), wherein the first exogenous coding sequence and second exogenous coding sequence are in frame with and downstream (3′) of an exogenous coding sequence or partial coding sequence of the GAPDH gene, wherein the knock-in cassette is integrated into the genome of the cell by homology-directed repair (HDR) of the break, resulting in a genome-edited cell that expresses: (a) FcγRIII (CD16) or variant thereof, (b) mbIL-15, and (c) GAPDH, or a functional variant thereof.

[0082] In another aspect, the disclosure features a method of making a modified cell, e.g., a modified NK cell, a modified pluripotent human stem cell, a modified NK cell differentiated from such a stem cell, the method comprising (A) contacting a cell with: (i) an RNA-guided nuclease and a guide RNA that cause a break within an endogenous coding sequence of an essential gene in the cell, such as, e.g., glyceraldehyde 3-phosphate dehydrogenase (GAPDH) gene, and (ii) a donor template that comprises a knock-in cassette comprising a first exogenous coding sequence for FcγRIII (CD16) or variant thereof and a second exogenous coding sequence for a membrane bound interleukin 15 (mbIL-15), wherein the first exogenous coding sequence and second exogenous coding sequence are in frame with and downstream (3′) of an exogenous coding sequence or partial coding sequence of the essential gene, e.g., the GAPDH gene, wherein the knock-in cassette is integrated into the genome of the cell by homology-directed repair (HDR) of the break, resulting in a genome-edited cell that expresses: (a) FcγRIII (CD16) or variant thereof, (b) mbIL-15, and (c) the essential gene, e.g., GAPDH, or a functional variant thereof; and, (B) contacting the cell (e.g., the NK cell or the pluripotent human stem cell or the human induced pluripotent stem cell) with one or more of: at least one RNA-guided nuclease and at least one guide RNA comprising a targeting domain sequence, wherein the RNA-guided nuclease and the guide RNA cause a genomic edit within an endogenous coding sequence of a gene of interest, e.g., a break or genomic edit resulting in a loss of function of the gene of interest, wherein the gene of interest comprises, e.g., adenosine A2a receptor (ADORA2A), β-2 microglobulin (B2M), class II major histocompatibility complex transactivator (CIITA), cytokine inducible SH2 containing protein (CISH), two or more human leukocyte antigen (HLA) class II histocompatibility antigen alpha chain genes, two or more HLA class II histocompatibility antigen beta chain genes, natural killer group 2 member A receptor (NKG2A), programmed cell death protein 1 (PD-1), T cell immunoreceptor with Ig and ITIM domains (TIGIT), an agonist of the TGF beta signaling pathway (e.g., transforming growth factor beta receptor II (TGFβRII)), or any combination of two or more thereof.

[0083] In some embodiments, the method comprises contacting the cell with: (1) a guide RNA comprising (i) a targeting domain sequence comprising or consisting of the nucleotide sequence of SEQ ID NO:1155 or 1162, and (ii) a 5′ extension sequence depicted in Table 6; and (2) a guide RNA comprising (i) a targeting domain sequence comprising or consisting of the nucleotide sequence of SEQ ID NO: 1157 or 1161, and (ii) a 5′ extension sequence depicted in Table 6.

[0084] In some embodiments, the method comprises contacting the cell with: (1) a guide RNA comprising (i) a targeting domain sequence comprising or consisting of the nucleotide sequence of SEQ ID NO:1155 or 1162, (ii) a scaffold sequence comprising or consisting of the nucleotide sequence of SEQ ID NO: 1153 located 5′ of the targeting domain sequence, and (iii) the nucleotide sequence of SEQ ID NO: 1154 at the 5′ of the scaffold sequence; and (2) a guide RNA comprising (i) a targeting domain sequence comprising or consisting of the nucleotide sequence of SEQ ID NO: 1157 or 1161, (ii) a scaffold sequence comprising or consisting of the nucleotide sequence of SEQ ID NO: 1153 located 5′ of the targeting domain sequence, and (iii) the nucleotide sequence of SEQ ID NO: 1154 at the 5′ of the scaffold sequence.

[0085] In some embodiments, the RNA-guided nuclease is a Cas12a variant. In some embodiments, the Cas12a variant comprises one or more amino acid substitutions selected from M537R, F870L, and H800A. In some embodiments, the Cas12a variant comprises amino acid substitutions M537R, F870L, and H800A. In some embodiments, the Cas12a variant comprises an amino acid sequence having 90%, 95%, or 100% identity to SEQ ID NO: 62.

[0086] In another aspect, the disclosure features a method of making a population of modified cells, e.g., a population of modified NK cells, a population of modified pluripotent human stem cells, a population of modified NK cells differentiated from such stem cells, the method comprising (A) contacting a population of cells with: (i) an RNA-guided nuclease and a guide RNA (e.g., configured together as an RNP) that cause a break within an endogenous coding sequence of an essential gene in at least one cell within the population of cells, such as, e.g., glyceraldehyde 3-phosphate dehydrogenase (GAPDH) gene, and (ii) a donor template that comprises a knock-in cassette comprising a first exogenous coding sequence for FcγRIII (CD16) or variant thereof and a second exogenous coding sequence for a membrane bound interleukin 15 (mbIL-15), wherein the first exogenous coding sequence and second exogenous coding sequence are in frame with and downstream (3′) of an exogenous coding sequence or partial coding sequence of the essential gene, e.g., the GAPDH gene, wherein the knock-in cassette is integrated into the genome of the cell by homology-directed repair (HDR) of the break, resulting in a genome-edited cell that expresses: (a) FcγRIII (CD16) or variant thereof, (b) mbIL-15, and (c) the essential gene, e.g., GAPDH, or a functional variant thereof; and (B) contacting the population of cells (e.g., the population of NK cells or the population of pluripotent human stem cells or the population of induced human induced pluripotent stem cells) with one or more of: at least one RNA-guided nuclease and a guide RNA comprising a targeting domain sequence, wherein the RNA-guided nuclease and the guide RNA cause a genomic edit within an endogenous coding sequence of a gene of interest within at least one cell in the population of cells, e.g., a genomic edit resulting in a break and/or a genomic edit resulting in a loss of function of the gene of interest, wherein the gene of interest comprises, e.g., adenosine A2a receptor (ADORA2A), β-2 microglobulin (B2M), class II major histocompatibility complex transactivator (CIITA), cytokine inducible SH2 containing protein (CISH), two or more human leukocyte antigen (HLA) class II histocompatibility antigen alpha chain genes, two or more HLA class II histocompatibility antigen beta chain genes, natural killer group 2 member A receptor (NKG2A), programmed cell death protein 1 (PD-1), T cell immunoreceptor with Ig and ITIM domains (TIGIT), an agonist of the TGF beta signaling pathway (e.g., transforming growth factor beta receptor II (TGFβRII)), or any combination of two or more thereof. In some embodiments, the population of cells is optionally contacted with at least a first RNA-guided nuclease and a first guide RNA that cause a genomic edit within the endogenous coding sequence of a first gene of interest and a second RNA-guided nuclease and a second guide RNA that cause a genomic edit within the endogenous coding sequence of a second gene of interest; and, optionally, wherein the population of cells is contacted with a third, fourth, and/or fifth (or more) RNA-guided nuclease and a third, fourth, and/or fifth (or more) guide RNA that causes a genomic edit within the endogenous coding sequence of a third, fourth, and/or fifth (or more) gene of interest, respectively.

[0087] In some embodiments, the RNA-guided nuclease editing efficiency is high, e.g., wherein the RNA-guided nuclease is capable of editing about 60% to 100% of cells in a population of cells, e.g., at least 60%, at least 65%, at least 70%, at least 75%, at least 80%, at least 85%, at least 90%, at least 95%, or at least 99% oc cells in a population. In some embodiments, the RNA-guided nuclease is configured with a guide RNA to form an RNP, and the RNP causes a break within the essential gene (e.g., within the terminal exon in the locus of any essential gene provided in Table 3, such as, e.g., GAPDH) in at least 60% of the cells in the population of cells (e.g., in at least 60%, in at least 65%, in at least 70%, in at least 75%, in at least 80%, in at least 85%, in at least 90%, in at least 91%, in at least 92%, in at least 93%, in at least 94%, in at least 95%, in at least 96%, in at least 97%, in at least 98%, or in at least 99% of the cells in the population of cells). In some embodiments, the RNA-guided nuclease is configured with a guide RNA to form an RNP, and the RNP induces knock-in cassette integration at the essential gene (e.g., within the terminal exon in the locus of any essential gene provided in Table 3, such as, e.g., GAPDH) in at least 50% of the cells in the population of cells (e.g., in at least 50%, in at least 55%, in at least 60%, in at least 65%, in at least 70%, in at least 75%, in at least 80%, in at least 85%, in at least 90%, in at least 91%, in at least 92%, in at least 93%, in at least 94%, in at least 95%, in at least 96%, in at least 97%, in at least 98%, or in at least 99% of the cells in the population of cells) at between 4 days and 9 days (e.g., at 4 days, 5 days, 6 days, 7 days, 8 days or 9 days) after the population of cells is contacted with the RNA-guided nuclease and the guide RNA (the RNP) and the donor template. In some embodiments, the RNA-guided nuclease comprises Cas9, Cas12a, Cas12b, Cas12c, Cas12e, CasX, or CasΦ (Cas12j), or a variant thereof, e.g., a variant capable of editing about 60% to 100% of cells in a population of cells.

[0088] In some embodiment, at least 50% (e.g., at least 50%, at least 55%, at least 60%, at least 65%, at least 70%, at least 75%, at least 80%, at least 85%, at least 90%, at least 95%, at least 98%, or at least 99%) of the cells in the population of cells comprises the knock-in cassette comprising the first and second exogenous coding sequences integrated at the essential gene in the genome at between 4 days and 9 days (e.g., at 4 days, 5 days, 6 days, 7 days, 8 days or 9 days) after the population of cells is contacted with the donor template and the RNA-guided nuclease and the guide RNA (e.g., configured together an an RNP) that cause a break within the endogenous coding sequence of the essential gene.

[0089] In some embodiments, at least 50% (e.g., at least 50%, at least 55%, at least 60%, at least 65%, at least 70%, at least 75%, at least 80%, at least 85%, at least 90%, at least 95%, at least 98%, or at least 99%) of the cells in the population of cells comprises the knock-in cassette comprising the first and second exogenous coding sequences integrated at the essential gene in the genome at between 4 days and 9 days (e.g., at 4 days, 5 days, 6 days, 7 days, 8 days or 9 days) after the population of cells is contacted with the donor template and the RNA-guided nuclease and the guide RNA (e.g., configured together an an RNP) that cause a break within the endogenous coding sequence of the essential gene, and at least 60% of the cells (e.g., at least 60%, at least 65%, at least 70%, at least 75%, at least 80%, at least 85%, at least 90%, at least 95%, at least 98%, or at least 99%) in the population of cells comprises a genomic edit (e.g., a genomic edit resulting in a break and/or a genomic edit resulting in a loss of function) within an endogenous coding sequence of a gene of interest, e.g., at between 4 days and 9 days (e.g., at 4 days, 5 days, 6 days, 7 days, 8 days or 9 days) after the population of cells is contacted with the an RNA-guided nuclease and a guide RNA (e.g., configured together an RNP) that cause a genomic edit within the endogenous coding sequence of the gene of interest.

[0090] In some embodiments, at least 50% (e.g., at least 50%, at least 55%, at least 60%, at least 65%, at least 70%, at least 75%, at least 80%, at least 85%, at least 90%, at least 95%, at least 98%, or at least 99%) of the cells in the population of cells comprise the knock-in cassette comprising the first and second exogenous coding sequences integrated at the essential gene in the genome at between 4 days and 9 days (e.g., at 4 days, 5 days, 6 days, 7 days, 8 days or 9 days) after the population of cells is contacted with the donor template and the RNA-guided nuclease and the guide RNA (e.g., configured together as an RNP) that cause a break within the endogenous coding sequence of the essential gene, and at least 60% of the cells (e.g., at least 60%, at least 65%, at least 70%, at least 75%, at least 80%, at least 85%, at least 90%, at least 95%, at least 98%, or at least 99%) in the population of cells comprise a genomic edit (e.g., a genomic edit resulting in a break and/or a genomic edit resulting in a loss of function) within an endogenous coding sequence of a gene of interest, e.g., at between 4 days and 9 days (e.g., at 4 days, 5 days, 6 days, 7 days, 8 days or 9 days) after the population of cells is contacted with an RNA-guided nuclease and a guide RNA (e.g., configured together as an RNP) that cause a genomic edit within the endogenous coding sequence of the gene of interest. In some embodiments, at least 50% (e.g., at least 50%, at least 55%, at least 60%, at least 65%, at least 70%, at least 75%, at least 80%, at least 85%, at least 90%, at least 95%, at least 98%, or at least 99%) of the cells in the population of cells comprise the knock-in cassette comprising the first and second exogenous coding sequences integrated at the essential gene in the genome at between 4 days and 9 days (e.g., at 4 days, 5 days, 6 days, 7 days, 8 days or 9 days) after the population of cells is contacted with the donor template and the RNA-guided nuclease and the guide RNA (e.g., configured together as an RNP) that cause a break within the endogenous coding sequence of the essential gene; and at least 60% of the cells (e.g., at least 60%, at least 65%, at least 70%, at least 75%, at least 80%, at least 85%, at least 90%, at least 95%, at least 98%, or at least 99%) in the population of cells comprise a genomic edit (e.g., a genomic edit resulting in a break and/or a genomic edit resulting in a loss of function) within an endogenous CISH coding sequence, e.g., at between 4 days and 9 days (e.g., at 4 days, 5 days, 6 days, 7 days, 8 days or 9 days) after the population of cells is contacted with an RNA-guided nuclease and a guide RNA (e.g., configured together as an RNP) that cause a genomic edit within the endogenous CISH coding sequence; and at least 60% of the cells (e.g., at least 60%, at least 65%, at least 70%, at least 75%, at least 80%, at least 85%, at least 90%, at least 95%, at least 98%, or at least 99%) in the population of cells comprise a genomic edit (e.g., a genomic edit resulting in a break and/or a genomic edit resulting in a loss of function) within an endogenous TGFβRII coding sequence, e.g., at between 4 days and 9 days (e.g., at 4 days, 5 days, 6 days, 7 days, 8 days or 9 days) after the population of cells is contacted with an RNA-guided nuclease and a guide RNA (e.g., configured together as an RNP) that cause a genomic edit within the endogenous TGFβRII coding sequence.

[0091] In some embodiments, at least 50% (e.g., at least 50%, at least 55%, at least 60%, at least 65%, at least 70%, at least 75%, at least 80%, at least 85%, at least 90%, at least 95%, at least 98%, or at least 99%) of the cells in the population of cells expresses FcγRIII (CD16) or variant thereof and mbIL-15, e.g., at between 4 days and 9 days (e.g., at 4 days, 5 days, 6 days, 7 days, 8 days or 9 days) after the population of cells is contacted with the RNA-guided nuclease and the guide RNA (e.g., configured together as an RNP) and the donor template. In some embodiments, at least 50% (e.g., at least 50%, at least 55%, at least 60%, at least 65%, at least 70%, at least 75%, at least 80%, at least 85%, at least 90%, at least 95%, at least 98%, or at least 99%) of the cells in the population of cells expresses FcγRIII (CD16) or variant thereof and mbIL-15, e.g., at between 4 days and 9 days (e.g., at 4 days, 5 days, 6 days, 7 days, 8 days or 9 days) after the population of cells is contacted with the RNA-guided nuclease and the guide RNA (e.g., configured together as an RNP) and the donor template, and at least 60% of the cells (e.g., at least 60%, at least 65%, at least 70%, at least 75%, at least 80%, at least 85%, at least 90%, at least 95%, at least 98%, or at least 99%) in the population of cells do not express CISH or TGFβRII after the population of cells is contacted with an RNA-guided nuclease and guide RNAs (e.g., configured as an RNP) that cause a genomic edit within the endogenous CISH and TGFβRII coding sequences.

### BRIEF DESCRIPTION OF THE DRAWING

[0092] The teachings described herein will be more fully understood from the following description of various exemplary embodiments, when read together with the accompanying drawing. It should be understood that the drawing described below is for illustration purposes only and is not intended to limit the scope of the present teachings in any way.

[0093] FIG. 1 shows the locations on the GAPDH gene where exemplary AsCpf1 (AsCas12a) guide RNAs bind, and the results of screening the exemplary guide RNAs that target the GAPDH gene three days after transfection. Results are from gDNA from living cells.

[0094] FIG. 2 shows results of screening the exemplary AsCpf1 (AsCas12a) guide RNAs that target the GAPDH gene, three days after transfection. Results are from gDNA from living cells.

[0095] FIG. 3A shows an exemplary integration strategy that targets an essential gene according to certain embodiments of the present disclosure. In particular embodiments, introducing a double strand break using CRISPR gene editing (e.g., by Cas12a, Cas9, Cas12b, Cas12c, Cas12e, CasX, or CasΦ (Cas12j), or a variant thereof, e.g., a variant with a high editing efficiency, e.g., capable of editing about 60% to 100% of cells in a population of cells) within a terminal exon (e.g., within about 500 bp upstream (5′) of the stop codon of the essential gene) and administering a donor plasmid with homology arms designed to mediate homology directed repair (HDR) at the cleavage site, results in a population of viable cells carrying a cargo of interest integrated at the essential gene locus. Those cells that were edited by the CRISPR nuclease, but failed to undergo integration of the cargo at the essential gene locus, do not survive.

[0096] FIG. 3B shows an exemplary integration strategy that targets the GAPDH gene according to certain embodiments of the present disclosure. Although FIG. 3B shows a strategy wherein the GAPDH gene is modified in an induced pluripotent stem cell (iPSC), this strategy can be applied to a variety of cell types, including primary cells, e.g., T cells, NK cells, stem cells, iPSCs, and cells differentiated from iPSCs, e.g., iPSC-derived T cells or NK cells for treating cancer.

[0097] FIG. 3C shows an exemplary integration strategy that targets the GAPDH gene according to certain embodiments of the present disclosure. The diagram shows that the only cells that should survive over time are those cells that underwent targeted integration of a cassette that restores the GAPDH locus and includes a cargo of interest, as well as unedited cells. The population of unedited cells following CRISPR editing should be small if the nuclease and guide RNA are highly effective at cleaving the essential gene target site and introduce indels that significantly reduce the function of the essential gene product.

[0098] FIG. 3D shows an exemplary integration strategy that targets an essential gene according to certain embodiments of the present disclosure. In particular embodiments, introducing a double strand break using CRISPR gene editing (e.g., by Cas12a, Cas9, Cas12b, Cas12c, Cas12e, CasX, or CasΦ (Cas12j), or a variant thereof, e.g., a variant with a high editing efficiency, e.g., capable of editing about 60% to 100% of cells in a population of cells) to target a 5′ exon (e.g., within about 500 bp downstream (3′) of a start codon of the essential gene) and administering a donor plasmid with homology arms designed to mediate homology directed repair (HDR) at the cleavage site, results in a population of viable cells carrying a cargo of interest integrated at the essential gene locus. Those cells that were edited by the CRISPR nuclease, but failed to undergo integration of the cargo at the essential gene locus, do not survive.

[0099] FIG. 4 shows editing efficiency at different concentrations (0.625 μM to 4 μM) of an exemplary AsCpf1 (AsCas12a) guide RNA that targets the GAPDH gene.

[0100] FIG. 5 shows the knock-in (KI) efficiency of a CD47 encoding “cargo” in the GAPDH gene 4 days post-electroporation when the dsDNA plasmid (“PLA”) was also present. Knock-in efficiency was measured with two different concentrations of the plasmid. Knock-in was measured using ddPCR targeting the 3′ positions of the knock-in “cargo”.

[0101] FIG. 6 shows the knock-in efficiency of a CD47 encoding “cargo” in the GAPDH gene 9 days post-electroporation when the dsDNA plasmid was also present. Knock-in was measured using ddPCR both targeting the 5′ and 3′ positions of the knock-in “cargo”, increasing the reliability of the result.

[0102] FIG. 7 shows the efficiency of integration of a knock-in cassette, comprising a GFP protein encoding “cargo” sequence, into the GAPDH locus of iPSCs, measured 7 days following transfection. (A) Depicts exemplary microscopy (brightfield and fluorescent) images, and (B) depicts exemplary flow cytometry data. Images and flow cytometry data depict insertion rates for cargo transfection alone (PLA1593 or PLA1651) compared to cargo and guide RNA transfections (RSQ22337+PLA1593 or RSQ24570+PLA1651), additionally, insertion rates with an exemplary exonic coding region targeting guide RNA with appropriate cargo (RSQ22337+PLA1593) are compared to insertion rates with an intronic targeting guide RNA with appropriate cargo (RSQ24570+PLA1651).

[0103] FIG. 8A depicts a schematic representation of a bicistronic knock-in cassette (e.g., comprising two cistrons separated by a linker) for insertion into the GAPDH locus. The leading GAPDH Exon 9 coding region and exogenous sequences encoding proteins of interest are separated by linker sequences, and the second GAPDH allele can comprise a target knock-in cassette insertion, indels, or is wild type (WT).

[0104] FIG. 8B depicts a schematic representation of bi-allelic knock-in cassettes for insertion into the GAPDH locus. Exogenous “cargo” sequences encoding proteins of interest are located on different knock-in cassettes. For each construct, the leading GAPDH Exon 9 coding region is separated from an exogenous sequence encoding a protein of interest by a linker sequence.

[0105] FIG. 9A depicts a schematic representation of a bicistronic knock-in cassette for insertion into the GAPDH locus, with the leading GAPDH Exon 9 coding region and exogenous sequences encoding GFP and mCherry separated by linker sequences P2A, T2A, and/or IRES.

[0106] FIG. 9B is a panel of exemplary microscopic images (brightfield and fluorescent) of iPSCs nine days following nucleofection of RNPs comprising RSQ22337 (SEQ ID NO: 95) targeting GAPDH and Cas12a (SEQ ID NO: 62) and a bicistronic knock-in cassette comprising “cargo” sequence encoding GFP and mCherry molecules inserted at the GAPDH locus. iPSCs comprising exemplary “cargo” molecules PLA1582 (comprising donor template SEQ ID NO: 41) with linkers P2A and T2A, PLA1583 (comprising donor template SEQ ID NO: 42) with linkers T2A and P2A, and PLA1584 (comprising donor template SEQ ID NO: 43) with linkers T2A and IRES are shown. Results show that at least two different cargos can be inserted in a bicistronic manner and expression is detectable irrespective of linker type used. All images were taken at 2×100 μm on a Keyence Microscope.

[0107] FIG. 9C depicts expression quantification (Y axis) of exemplary “cargo” molecules GFP and mCherry from various bicistronic molecules comprising the described linker pairs (X axis). mCherry as a sole “cargo” protein was utilized as a relative control.

[0108] FIG. 10A depicts exemplary flow cytometry data for bi-allelic GFP and mCherry knock-in at the GAPDH gene.

[0109] FIG. 10B depicts fluorescence imaging of cell populations prior to flow cytometry analysis following bi-allelic GFP and mCherry knock-in at the GAPDH gene.

[0110] FIG. 10C are histograms depicting exemplary flow cytometry analysis data for bi-allelic GFP and mCherry knock-in at the GAPDH gene. Cells were nucleofected with 0.5 μM RNPs comprising Cas12a (SEQ ID NO: 62) and RSQ22337 (SEQ ID NO: 95), and 2.5 μg (5 trials) or 5 μg (1 trial) GFP and mCherry donor templates.

[0111] FIG. 11A depicts exemplary flow cytometry data for GFP expression in iPSCs seven days after being transfected with a gRNA and an appropriate donor template comprising a knock-in cassette with a “cargo” sequence encoding GFP that was recombined into various loci.

[0112] FIG. 11B depicts the percentage of cells having editing events as measured by Inference of CRISPR Edits (ICE) assays 48 hours after being transfected with the noted gRNA.

[0113] FIG. 11C depicts relative integrated “cargo” (GFP) expression intensity as determined by flow cytometry conducted with a FITC channel to filter GFP signal for iPSCs transfected with the noted exemplary gRNA and knock-in cassette combinations.

[0114] FIG. 11D depicts relative integrated “cargo” (GFP) expression intensity as determined by flow cytometry conducted with a FITC channel to filter GFP signal for iPSCs transfected with exemplary gRNA targeting the noted essential gene. Knock-in efficiency at each essential gene is denoted by a percentage.

[0115] FIG. 12 depicts exemplary flow cytometry data highlighting the efficiency of integration of a donor template comprising a knock-in cassette comprising a GFP protein encoding “cargo” sequence into the TBP locus of iPSCs.

[0116] FIG. 13 is exemplary ddPCR results describing knock-in cassette integration ratios in GAPDH or TBP alleles in an iPSC population.

[0117] FIG. 14 is a histogram representation of exemplary flow cytometry data for AAV6 mediated knock-in of GFP into T cells using RNPs comprising RSQ22337 targeting GAPDH and Cas12a (SEQ ID NO: 62) at various concentrations of RNP and various AAV6 multiplicity of infection (MOI) rates (vg/cell) measured seven days after electroporation and transduction. The Y axis represents percentage of the cell population expressing GFP, while the X axis depicts AAV6 MOI.

[0118] FIG. 15 is a histogram representation of exemplary flow cytometry data depicting cell viability following AAV6 mediated knock-in of GFP at the GAPDH gene in differentiated cells. Depicted is T cell viability four days after AAV6 mediated transduction of a GFP cargo and electroporation with 1 μM RNPs comprising RSQ22337 and Cas12a (SEQ ID NO: 62); the Y axis notes cell viability as a function of total cell population, while the X axis lists various MOIs used to transduce the cells.

[0119] FIG. 16A depicts exemplary flow cytometry charts for a population of T cells transduced by AAV6 comprising a knock-in GFP cargo targeting GAPDH at 5E4 MOI and transformed with 4 μM RNP comprising Cas12a (SEQ NO: 62) and RSQ22337.

[0120] FIG. 16B depicts exemplary control experiment flow cytometry charts for T cells that were not transduced by AAV6, but solely transformed with 4 μM RNP comprising Cas12a (SEQ NO: 62) and RSQ22337.

[0121] FIG. 17A are histograms depicting exemplary flow cytometry data for AAV6 mediated knock-in of GFP into T cells at either the GAPDH locus using RNPs comprising RSQ22337 and Cas12a (SEQ ID NO: 62), or at the TRAC locus. Integration constructs each comprised homology arms approximately 500 bp in length, and T cells were transduced with the same concentration of RNP and AAV MOI. The mean and standard deviation of three independent biological replicates is shown, significant differences in targeted integration were observed (p=0.0022 using unpaired t-test).

[0122] FIG. 17B depicts an exemplary flow cytometry chart for a population of T cells transduced by AAV6 comprising a GFP cargo targeted for knock-in at GAPDH at 5E4 MOI and transformed with 4 μM of RNPs comprising Cas12a (SEQ NO: 62) and RSQ22337.

[0123] FIG. 17C depicts exemplary expansion and viability data for a population of T cells transduced by AAV6 and transformed with RNPs as described in FIG. 17B, and for a population of T cells that did not undergo RNP transfection (“mock”).

[0124] FIG. 17D depicts exemplary flow cytometry data for AAV6 mediated knock-in of GFP into T cells at either the GAPDH locus using RNPs comprising RSQ22337 and Cas12a (SEQ ID NO: 62), as described in FIG. 17B, or at the TRAC locus. Integration constructs each comprised homology arms approximately 500 bp in length, and T cells were transduced with the same concentration of RNPs and AAV MOI. Three independent biological replicates are shown, significant differences in targeted integration were observed (p=<0.001 using unpaired t-test).

[0125] FIG. 17E depicts exemplary flow cytometry data for AAV6 mediated knock-in of GFP into T cells at either the GAPDH locus (GAPDH KI) using RNPs comprising RSQ22337 and Cas12a (SEQ ID NO: 62), or at the TRAC locus (TRAC KI). Knock-in efficiency was examined at varying concentrations of AAV6. Integration constructs each comprised homology arms approximately 500 bp in length. The X-axis quantifies AAV6 concentration (vg/ml), while the Y-axis quantifies the percentage of cells that are expressing GFP as detected by flow cytometry. Three independent biological replicates are shown per each knock-in location at each AAV6 concentration. Significant differences in EC50 for AAV6 concentration were observed. ****p=<0.0001 (unpaired t-test).

[0126] FIG. 18A is a histogram depicting the knock-in efficiency of CD16 encoding “cargo” integrated at the GAPDH gene of iPSCs. Targeting integration (TI) was measured at day 0 and day 19 of bulk edited cell populations using ddPCR targeting the 5′ (5′ assay) and 3′ (3′ assay) positions of the knock-in cargo.

[0127] FIG. 18B is a histogram depicting the genotypes of iPSC clones with CD16 encoding “cargo” integrated at the GAPDH gene, measured using ddPCR targeting the 5′ (5′ CDN probe) and 3′ (3′ Poly A probe) positions of the knock-in cargo. Shown are results for four exemplary cell lines, two lines were classified as homozygous knock-in with targeted integration (TI) rates of 88.5% (clone 1) and 90.5% (clone 2) respectively, and two lines were classified as heterozygous knock-in with TI rates of 45.6% (clone 1) and 46.5% (clone 2) respectively.

[0128] FIG. 19A depicts exemplary flow cytometry data from day 32 of homozygous clone 1 CD16 knock-in iPSCs differentiated into iNKs. The data highlights the efficiency of integration and high expression (e.g., approximately 98%) of a knock-in cassette comprising a CD16 protein encoding “cargo” sequence into the GAPDH gene of iPSCs. In addition, the data shows knock-in of a “cargo” at the GADPH gene does not inhibit the differentiation process, as represented by high CD56+CD45+ population proportions.

[0129] FIG. 19B depicts exemplary flow cytometry data from day 32 of homozygous clone 2 CD16 knock-in iPSCs differentiated into iNKs. The data highlights the efficiency of integration and expression of a knock-in cassette comprising a CD16 protein encoding “cargo” sequence into the GAPDH gene of iPSCs.

[0130] FIG. 19C depicts exemplary flow cytometry data from day 32 of heterozygous clone 1 CD16 knock-in iPSCs differentiated into iNKs. The data highlights the efficiency of integration and high expression (e.g., approximately 97.8%) of a knock-in cassette comprising a CD16 protein encoding “cargo” sequence into the GAPDH gene of iPSCs.

[0131] FIG. 19D depicts exemplary flow cytometry data from day 32 of heterozygous clone 2 CD16 knock-in iPSCs differentiated into iNKs. The data highlights the efficiency of integration and expression of a knock-in cassette comprising a CD16 protein encoding “cargo” sequence into the GAPDH gene of iPSCs.

[0132] FIG. 20 is a schematic representation of an exemplary solid tumor cell killing assay, depicting the use of knock-in iPSCs differentiated into iNK cells to kill 3D spheroids created from a cancer cell line (e.g., SK-OV-3 ovarian cancer cells). Antibodies and/or cytokines may optionally be added during the 3D spheroid killing stage.

[0133] FIG. 21A shows the results of a solid tumor killing assay as described in FIG. 20. Homozygous clones comprising CD16 knock-in at the GAPDH gene were differentiated into iNK cells and functioned to reduce tumor cell spheroid size, particularly following the addition of an antibody, e.g., 10 μg/mL trastuzumab; addition of an antibody promotes antibody dependent cellular cytotoxicity (ADCC) and tumor cell killing by iNKs. Control “WT PCS” cells were bulk unedited parental clones that were electroporated without RNPs or plasmids, and at the same stage of iNK cell differentiation as test cells. The Y axis depicts normalized total integrated red object intensity, a proxy for tumor cell abundance, while the X axis depicts the Effector to Target cell (E:T) ratio.

[0134] FIG. 21B shows the results of a solid tumor killing assay as described in FIG. 20. Heterozygous clones comprising CD16 knock-in at the GAPDH gene were differentiated into iNK cells and functioned to reduce tumor cell spheroid size, particularly following the addition of an antibody, e.g., 10 μg/mL trastuzumab; addition of an antibody promotes ADCC and tumor cell killing by iNKs. Control “WT PCS” cells were bulk unedited parental clones that were electroporated without RNPs or plasmids, and at the same stage of iNK cell differentiation as test cells. The Y axis depicts normalized total integrated red object intensity, a proxy for tumor cell abundance, while the X axis depicts the E:T ratio.

[0135] FIG. 22 shows the results of an in vitro serial killing assay, where homozygous or heterozygous clones comprising CD16 knock-in at the GAPDH gene were differentiated into iNK cells and were serially challenged with hematological cancer cells (e.g., Raji cells), with or without the addition of antibody (0.1 μg/mL rituximab). The X axis represents time (0-598 hr.) with an additional tumor cell bolus (5,000 cells) being added approximately every 48 hours, and the Y axis represents killing efficacy as measured by normalized total red object area (e.g., presence of tumor cells). Star (*) denotes onset of addition of 0.1 μg/mL rituximab in previously rituximab absent trials. The data shows that edited iNK cells (CD16 knock-in at GAPDH gene; clones “Homo_C1”, “Homo_C2”, “Het_C1”, and “Het_C2”) continue to kill hematological cancer cells while unedited (“PCS”) or control edited iNKs (“GFP Bulk”) derived from parental iPSCs lose this function at equivalent time points.

[0136] FIG. 23 depicts a correlation (R² of 0.768) between CD16 expression and reduction in tumor spheroid size at an Effector to Target (E:T) ratio of 3.16:1. Shown are differentiated iNK cells derived from either iPSC bulk edited cells or iPSC individual clones with CD16 knock-in at the GAPDH gene. The Y axis represents normalized tumor cell killing values, while the X axis represents the percentage of a cell population expressing CD16.

[0137] FIG. 24A is a histogram depicting exemplary ddPCR data measured at day 9 post nucleofection of two different iPSC lines with plasmids and 2 μM RNPs comprising RSQ22337 targeting the GAPDH gene and Cas12a (SEQ ID NO: 62), for knock-in of CD16 cargo, a CAR cargo, or a biallelic GFP/mCherry cargo into the GAPDH gene.

[0138] FIG. 24B depicts exemplary flow cytometry data from iPSC lines edited with plasmids and 2 μM RNPs comprising RSQ22337 targeting the GAPDH gene and Cas12a (SEQ ID NO: 62) for knock-in of CXCR2 cargo into the GAPDH gene (GAPDH::CXCR2), or control iPSCs transformed with RNP only (Wild-type). CXCR2 expression is noted on the X axis, edited cells expressing CXCR2 were 29.2% of the bulk edited cell population, while surface expression of CXCR2 was 8.53% of the bulk edited cell population.

[0139] FIG. 25 is a histogram depicting the knock-in efficiency of a series of knock-in cassette cargo sequences such as CD16-P2A-CAR, CD16-IRES-CAR, CAR-P2A-CD16, CAR-IRES-CD16, and mbIL-15 into the GAPDH gene using RNPs comprising RSQ22337 targeting the GAPDH gene and Cas12a (SEQ ID NO: 62), measured on day 0 post-electroporation using ddPCR targeting the 5′ (5′ CDN probe) and 3′ (3′ Poly A probe) positions of the knock-in “cargo”.

[0140] FIG. 26 diagrammatically depicts a membrane-bound IL15.IL15Rα (mbIL-15) construct that can be utilized as a knock-in cargo sequence as described herein.

[0141] FIG. 27 is a histogram depicting the TI of mbIL-15 into the GAPDH gene when measured as a percentage of a bulk edited population. Shown are TI rates from iPSCs that that are on day 28 of the differentiation to iNK cell process.

[0142] FIG. 28A depicts exemplary flow cytometry data from bulk edited mbIL-15 GAPDH gene knock-in iPSC populations at day 39 of differentiation into iNKs.

[0143] FIG. 28B depicts exemplary flow cytometry data from bulk edited mbIL-15 GAPDH gene knock-in iPSC populations at day 39 of differentiation into iNKs.

[0144] FIG. 28C shows surface expression phenotypes (measured as a percentage of the population) of bulk edited mbIL-15 GAPDH gene knock-in iPSC populations being differentiated into iNK cells as compared to parental clone cells also being differentiated into iNK cells (“WT”) at day 32, day 39, day 42, and day 49 of iPSC differentiation.

[0145] FIG. 29 shows the results from two in-vitro tumor cell killing assays. Two biological replicates of bulk edited iPSC populations (S1 and S2) comprising mbIL-15 knock-in at the GAPDH gene were differentiated into iNK cells (day 56 of differentiation for S2, and day 63 of differentiation for S1) and functioned to reduce hematological cancer cells (e.g., Raji cells) fluorescence signal when compared to WT parental cells also differentiated into iNK cells, measured in the absence or presence of 10 μg/mL rituximab, E:T ratios of 1 (A) or 2.5 (B); (experiments performed in duplicate, R1 and R2).

[0146] FIG. 30A shows the results of a solid tumor killing assay as described in FIG. 20. Two biological replicates of bulk edited iPSC populations (S1 and S2) comprising mbIL-15 knock-in at the GAPDH gene were differentiated into iNK cells (day 39 of iPSC differentiation) and functioned to reduce tumor cell spheroid size when compared to WT parental cells also differentiated into iNK cells. Addition of 5 ng/mL exogenous IL-15 increased tumor cell killing by iNKs. The Y axis depicts normalized total integrated red object intensity, a proxy for tumor cell abundance, while the X axis depicts E:T ratio.

[0147] FIG. 30B shows the results of solid tumor killing assays as described in FIG. 20. Two biological replicates of bulk edited iPSC populations (S1 and S2) comprising mbIL-15 knock-in at the GAPDH gene were differentiated into iNK cells (day 39 of differentiation) and functioned to reduce tumor cell spheroid size when compared to WT parental cells also differentiated into iNK cells at corresponding stages of differentiation and E:T ratios (shown is an E:T ratio of approximately 31.6). Addition of 5 ng/mL exogenous IL-15 was necessary for robust WT iNK cell spheroid reduction, while mbIL-15 KI iNK cells were able to reduce tumor volume without exogenous IL-15. X axis represents time (0-100 hr) while the Y axis represents killing efficacy as measured by normalized total red object area (e.g., presence of tumor cells).

[0148] FIG. 30C shows the results of solid tumor killing assays as described in FIG. 20. Two biological replicates of bulk edited populations (S1 and S2) comprising mbIL-15 knock-in at the GAPDH gene were differentiated into iNK cells (e.g., at day 39, day 42, day 49, day 56, and day 63 of differentiation) and functioned to reduce tumor cell spheroid size when compared to WT parental cells at corresponding stages of iNK cell differentiation (experiments performed in duplicate, R1 and R2).

[0149] FIG. 30D shows the results of solid tumor killing assays as described in FIG. 20. Two biological replicates of bulk edited iPSC populations (S1 and S2) comprising mbIL-15 knock-in at the GAPDH gene were differentiated into iNK cells (e.g., at day 39, day 42, day 49, day 56, and day 63 of differentiation; in duplicate R1 and R2) and functioned to reduce tumor cell spheroid size when compared to WT parental cells at corresponding stages of iNK cell differentiation (experiments performed in duplicate, R1 and R2). Cell populations were supplemented with exogenous IL-15 (5 ng/mL), leading to more robust iNK cell induced spheroid reduction at each stage of maturation tested when compared to non-supplemented cells (FIG. 30C) (experiments performed in duplicate, R1 and R2).

[0150] FIG. 31A shows the results of solid tumor killing assays as described in FIG. 20. Two biological replicates of bulk edited iPSC populations (S1 and S2) comprising mbIL-15 knock-in at the GAPDH gene were differentiated into iNK cells (day 63 of iPSC differentiation for S1, and day 56 of iPSC differentiation for S2) and functioned to reduce tumor cell spheroid size. The Y axis represents killing efficacy as measured by normalized total red object area (e.g., presence of tumor cells), while the X axis represents the E:T cell ratio; experiments were performed in duplicate or triplicate, R1, R2, and R2.1.

[0151] FIG. 31B shows the results of solid tumor killing assays as described in 31A, but with the addition of 10 μg/mL Herceptin antibody, an addition that triggers ADCC tumor cell killing.

[0152] FIG. 31C shows the results of solid tumor killing assays as described in 31A, but with the addition of 5 ng/ml exogenous IL-15.

[0153] FIG. 31D shows the results of solid tumor killing assays as described in 31A, but with the addition of 5 ng/ml exogenous IL-15 and 10 μg/mL Herceptin antibody, an addition that triggers ADCC tumor cell killing.

[0154] FIG. 32 depicts the cumulative results of two independent sets of cells and 3-5 repeats of solid tumor killing assays as described in FIG. 20. Two independent bulk edited populations (S1 and S2) comprising mbIL-15 knock-in at the GAPDH gene were differentiated into iNK cells (day 39 and 49 of iPSC differentiation for set 1, and day 42 of iPSC differentiation for S2) and functioned to significantly reduce tumor cell spheroid size when compared to differentiated WT parental cell iNKs in the absence of exogenous IL-15 (P=0.034, +/−standard deviation, unpaired t-test); in addition, differentiated knock-in cells trended towards significant reduction of tumor cell spheroid size when compared to differentiated WT parental cells in the presence of 5 ng/mL exogenous IL-15 (P=0.052, +/−standard deviation, unpaired t-test).

[0155] FIG. 33A schematically depicts a knock-in cassette cargo sequence comprising membrane-bound IL15.IL15Rα (mbIL-15) coupled with a GFP sequence, for integration at a target gene as described herein.

[0156] FIG. 33B schematically depicts a knock-in cassette cargo sequence comprising CD16, IL15, and IL15Rα, for integration at a target gene as described herein.

[0157] FIG. 33C schematically depicts a knock-in cassette cargo sequence comprising CD16 and membrane bound IL15.IL15Rα (mbIL-15), for integration at a target gene as described herein.

[0158] FIG. 34A depicts exemplary flow cytometry data from bulk edited iPSC populations seven days after transformation with PLA1829 (see FIG. 33A) comprising a cargo sequence of membrane-bound IL15.IL15Rα (mbIL-15) coupled with a GFP sequence inserted in the GAPDH gene using RNPs comprising RSQ22337 targeting the GAPDH gene and Cas12a (SEQ ID NO: 62), or control WT cells transformed with RNPs only, measured using ddPCR. Shown on the Y axis is IL-15Rα expression, while GFP expression is shown on the X axis.

[0159] FIG. 34B depicts exemplary flow cytometry data from bulk edited iPSC populations seven days after transformation with PLA1832 or PLA1834 (see FIGS. 33B and 33C), comprising a cargo sequence of CD16, IL-15, and IL 15Rα, or comprising a cargo sequence of CD16 and membrane-bound IL15.IL15Rα (mbIL-15); inserted in the GAPDH gene using RNPs comprising RSQ22337 targeting the GAPDH gene and Cas12a (SEQ ID NO: 62), measured using ddPCR. Shown on the Y axis is IL-15Rα expression, X axis is GFP expression.

[0160] FIG. 35A is a histogram depicting the genotypes of individual colonies following transformation as described in FIG. 34A with PLA1829 (5 μg) and 2 μM RNPs comprising RSQ22337 targeting the GAPDH gene and Cas12a (SEQ ID NO: 62), measured using ddPCR. Shown are individual homozygous (˜100% TI), heterozygous (˜50% TI), or wild type (˜0% TI) cells.

[0161] FIG. 35B is a histogram depicting the genotypes of individual colonies following transformation as described in FIG. 34B with PLA 1832 (5 μg) and 2 μM RNPs comprising RSQ22337 targeting the GAPDH gene and Cas12a (SEQ ID NO: 62), measured using ddPCR. Shown are individual homozygous (˜100% TI), heterozygous (˜50% TI), or wild type (˜0% TI) cells.

[0162] FIG. 35C is a histogram depicting the genotypes of individual colonies following transformation as described in FIG. 34B with PLA1834 (5 μg) and 2 μM RNPs comprising RSQ22337 targeting the GAPDH gene and Cas12a (SEQ ID NO: 62), measured using ddPCR. Shown are individual homozygous (˜100% TI), heterozygous (˜50% TI), or wild type (˜0% TI) cells.

[0163] FIG. 36A depicts exemplary flow cytometry data from cells comprising knock-in cargo sequences from PLA1829, PLA1832, or PLA1834 at the GAPDH gene (as described in FIG. 34A-34C) measured at day 32 of differentiation into iNKs; “WT” cells were transformed with RNPs only and were also at day 32 of differentiation into iNKs. The data highlights the efficiency of integration and expression of knock-in cassettes comprising an IL-15Rα protein encoding “cargo” sequence. The Y axis quantifies the percentage of cells from the noted population that are expressing IL-15Rα, while the X axis denotes colony genotype.

[0164] FIG. 36B depicts exemplary flow cytometry data from cells comprising knock-in cargo sequences from PLA1829, PLA1832, or PLA1834 at the GAPDH gene (as described in FIG. 34A-34C) measured at day 32 of differentiation into iNKs; “WT” cells were transformed with RNPs only and were also at day 32 of differentiation into iNKs. The data highlights the efficiency of integration and expression of knock-in cassettes comprising a CD16 protein encoding “cargo” sequence. The Y axis quantifies the percentage of cells from the noted population that are expressing CD16, while the X axis denotes colony genotype.

[0165] FIG. 36C depicts exemplary flow cytometry data from cells comprising knock-in cargo sequences from PLA1829, PLA1832, or PLA1834 at the GAPDH gene (as described in FIG. 34A-34C) measured at day 32 of differentiation into iNKs; “WT” cells were transformed with RNPs only and were also at day 32 of differentiation into iNKs. The data highlights the efficiency of integration and expression of knock-in cassettes comprising an IL-15Rα protein encoding “cargo” sequence. The Y axis quantifies the median fluorescence intensity (MFI) of a cell population expressing IL-15Rα, while the X axis denotes colony genotype.

[0166] FIG. 36D depicts exemplary flow cytometry data from cells comprising knock-in cargo sequences from PLA1829, PLA1832, or PLA1834 at the GAPDH gene (as described in FIG. 34A-34C) measured at day 32 of differentiation into iNKs; “WT” cells were transformed with RNPs only and were also at day 32 of differentiation into iNKs. The data highlights the efficiency of integration and expression of knock-in cassettes comprising a CD16 protein encoding “cargo” sequence. The Y axis quantifies the median fluorescence intensity (MFI) of a cell population expressing CD16, while the X axis denotes colony genotype.

[0167] FIG. 36E shows exemplary flow cytometry data from unedited (WT) cells or homozygous cells comprising knock-in cargo sequences from PLA1834 at the GAPDH locus (CD16^{+/+}/mbIL-15^{-/-}). The data highlights the efficiency of integration and expression of knock-in cassettes comprising a CD16 and IL-15Rα protein encoding cargo sequence. The Y axis quantifies the percentage of cells from the noted population that are expressing the selected gene, while the X axis denotes whether the selected gene is CD16 or IL-15Rα.

[0168] FIG. 36F depicts exemplary flow cytometry data from iNK cells comprising knock-in cargo sequences from PLA1829 or PLA1834 at the GAPDH gene, or from WT cells, before or after cytotoxicity assay in the absence of trastuzumab (Herceptin).

[0169] FIG. 36G depicts exemplary flow cytometry data from iNK cells comprising knock-in cargo sequences from PLA1829 or PLA1834 at the GAPDH gene, or from WT cells, before or after cytotoxicity assay in the presence of trastuzumab (Herceptin).

[0170] FIG. 36H depicts CD16 surface expression from two independent flow cytometry analyses of homozygous iNK cells comprising knock-in cargo sequences from PLA1834 at the GAPDH gene (CD16^{+/+}/mbIL-15^{+/+}), or unedited (WT) cells. CD16 surface expression was assessed before or after a 2D cell killing (LDH) assay and in absence or presence of trastuzumab. The Y axis quantifies the percentage of cells from the noted population that are CD56/CD16+, while the X axis denotes whether the sample was before or after the 2D killing assay.

[0171] FIG. 36I depicts percent cytotoxicity demonstrated by homozygous PLA1834-transformed (CD16^{+/+}/mbIL-15^{+/+}) iNK cells or unedited (WT) iNK cells in a 2D cell killing assay (LDH assay). Assays were performed in the presence or absence of 10 μg/ml trastuzumab at an E:T ratio of 1 (left) or 2.5 (right). The Y axis quantifies the percent cytotoxicity, while the X axis denotes the presence or absence of trastuzumab. *p<0.05, **p<0.01 (two-way ANOVA).

[0172] FIG. 36J depicts total cell number (left panel) of iNK cells comprising knock-in cargo sequences from PLA1829 or PLA1834 at the GAPDH gene, or of unedited (WT) iNK cells, following an in vitro persistence assay in the absence of the cytokines, IL-2 and IL-15. Fold change of cells comprising a knock-in from PLA1834 relative to cells comprising a homozygous knock-in from PLA1829 is shown in the top right panel. Fold change of cells comprising a homozygous knock-in from PLA1834 (CD16^{+/+}/mbIL-15^{+/+}) relative to unedited (WT) cells is shown in the bottom right panel.

[0173] FIG. 37A shows the results of a solid tumor killing assay as described in FIG. 20. Clones comprising homozygous CD16 knock-in at the GAPDH gene were differentiated into iNK cells and functioned to reduce tumor cell spheroid size, particularly following the addition of an antibody, e.g., 10 μg/mL trastuzumab. The addition of an antibody promotes antibody dependent cellular cytotoxicity (ADCC) and tumor cell killing by iNKs. Control “WT” cells were bulk unedited parental clones that were electroporated without RNPs or plasmids and were at the same stage of iNK cell differentiation as test cells. The Y axis depicts normalized total integrated red object intensity, a proxy for tumor cell abundance, while the X axis depicts the Effector to Target cell (E:T) ratio. The IC50 for “WT” cells was an E:T ratio of 3.0, while the IC50 for SLEEK CD16 KI cells was an E:T ratio of 0.5.

[0174] FIG. 37B shows the results of a 3D tumor spheroid killing assay conducted as depicted in FIG. 20. Homozygous PLA1834-transformed (CD16^{+/+}/mbIL-15^{-/-}) iNK cells and unedited (WT) iNK cells were introduced to SK-OV-3 tumor cells at an E:T ratio of 10 in the absence (left panels) or presence (right panels) of 10 μg/ml trastuzumab. The top panels display imaging of the tumor spheroid at 0 hours and 100 hours with visibility of the red object signal used to measure tumor cell abundance. The bottom panels display spheroid size as measured via the integrated red object intensity on the Y axis and time in hours on the X axis.

[0175] FIG. 37C shows the results of 3D tumor spheroid killing assays conducted as depicted in FIG. 20. Unedited (WT) iNK cells, peripheral blood NK cells, and two clones of homozygous PLA1834-transformed (CD16^{+/+}/mbIL-15^{+/+}) iNK cells were used against SK-OV-3 tumor cells at varying E:T ratios. In the left panels, 5 ng/ml exogenous IL-15 and 10 μg/ml trastuzumab was present. Two independent experiments were performed for each type of cell or clone with the exception of one experiment for the peripheral blood NK cells. IC50 values based on the top left panel are presented in the table in the bottom left panel and highlight the greater efficacy of the CD16^{+/+}/mbIL-15^{+/+}iNK cells in killing tumor cells. The right panel displays IC50 values from 3D tumor spheroid killing assays for homozygous PLA1834-transformed (CD16^{+/+}/mbIL-15^{+/+}) iNK cells and unedited (WT) iNK cells in the absence and presence of 10 μg/ml trastuzumab. *p<0.05, **p<0.01 (unpaired t-test).

[0176] FIG. 38A depicts percent cytotoxicity demonstrated by mbIL-15/CD16 (CD16^{+/+}/mbIL-15^{+/+}) DKI iNK cells or unedited (WT) iNK cells in a lactate dehydrogenase (LDH) cytotoxicity assay. Three different clones (A2, A4, C4) of mbIL-15/CD16 (CD16^{+/+}/mbIL-15^{+/+}) DKI iNK cells were tested. Assays were performed in the presence or absence of 10 μg/ml trastuzumab and at an E:T ratio of 1. The Y axis quantifies the percent cytotoxicity, while the X axis denotes the iNK cells examined. Error bars denote standard deviation.

[0177] FIG. 38B depicts flow cytometry data of unedited (WT) and mbIL-15/CD16 (CD16^{+/+}/mbIL-15^{+/+}) DKI iNK cells. Two clones (A2, A4) of mbIL-15/CD16 (CD16^{+/+}/mbIL-15^{+/+}) DKI iNK cells were examined. Cells were pre-gated for living hCD45+ cells and further analyzed for CD16/CD56 expression. Approximately 100% of mbIL-15/CD16 (CD16^{+/+}/mbIL-15+/+) DKI iNK cells displayed high CD16 expression compared to approximately 50% of WT iNK cells.

[0178] FIG. 38C is a schematic of an in vivo tumor killing assay. Mice were intraperitoneally inoculated with 0.25×10⁶ SKOV3-luc cells, and following 2-6 days to allow for tumor establishment, mice were randomized into groups. One day later, mice intraperitoneally received 2×10⁶ or 5×10⁶ mbIL-15/CD16 (CD16^{+/+}/mbIL-15^{+/+}) DKI iNK cells in combination with 2.5 mpk trastuzumab. In some treatment groups, mice received an additional dose of 2.5 mpk trastuzumab at 35 days (as indicated by the arrowhead) or at 21, 28, and 35 days (as indicated by the arrows) post-introduction of iNK cells. Mice were followed for up to 90 days post-introduction of iNK cells. The X axis represents time since introduction of NK cells.

[0179] FIG. 38D shows averaged results with standard error of the mean of the in vivo tumor killing assay described in FIG. 38C. Groups of mice are represented by each horizontal line. The groups included mice that received mbIL-15/CD16 (CD16^{+/+}/mbIL-15^{+/+}) DKI iNK cells (DKI iNK) with trastuzumab, trastuzumab alone, or an isotype control. Doses of trastuzumab are indicated by arrows and arrowheads for groups receiving a total of 4 doses or 2 doses, respectively. The X axis represents time since introduction of NK cells, while the Y axis represents tumor burden as measured by bioluminescent imaging (BLI) using an in vivo imaging system (IVIS).

[0180] FIG. 38E shows the survival of mice subjected to the in vivo tumor killing assay described in FIG. 38C. Groups of mice are represented by each horizontal line. Mice dosed with mbIL-15/CD16 (CD16^{+/+}/mbIL-15^{+/+}) DKI iNK cells in combination with trastuzumab (5M DKI iNK+Tras.×4, 2M DKI iNK+Tras×2) had prolonged survival compared to mice dosed with trastuzumab alone. The X axis represents time since introduction of NK cells, while the Y axis represents percent survival of the mice.

[0181] FIG. 38F shows bioluminescent imaging of mice subjected to the in vivo tumor killing assay described in FIG. 38C. The treatment groups of the mice are denoted along the top of the panel, while the time since introduction of NK cells is denoted along the left side of the panel. The right color scale represents the radiance (p/sec/cm²/sr) of the bioluminescence (from a minimum of 2.23×10⁶ to a maximum of 5.57×10⁷) as seen in the images.

[0182] FIG. 38G shows flow cytometry data of cells obtained by peritoneal lavage of mice subjected to the in vivo tumor killing assay described in FIG. 38C. The top row shows data following sacrifice at day 90, from the mouse that received 5×10⁶ mbIL-15/CD16 (CD16^{+/+}/mbIL-15^{+/+}) DKI iNK cells+trastuzumab according to the in vivo tumor killing assay as described in FIG. 38C. The bottom row shows data following sacrifice at day 118, from the mouse that received 2×10⁶ mbIL-15/CD16 (CD16^{+/+}/mbIL-15^{+/+}) DKI iNK cells+trastuzumab according to the in vivo tumor killing assay as described in FIG. 38C. iNK cells (inset boxes in top left and bottom left) were identified by flow cytometry using the human CD46 (hCD46) marker and further analyzed for expression of CD16/CD56. The data highlights that the mbIL-15/CD16 (CD16^{+/+}/mbIL-15^{+/+}) DKI iNK cells persist in vivo for at least 118 days.

[0183] FIG. 39A is a schematic of an in vivo tumor killing assay. Mice were intraperitoneally inoculated with 0.25×10⁶ SKOV3-luc cells, and following 2-6 days to allow for tumor establishment, mice were randomized into groups. One day later, mice intraperitoneally received 5×10⁶ (5M) unedited (WT) or mbIL-15/CD16 (CD16^{+/+}/mbIL-15^{+/+}) DKI iNK cells. In some treatment groups, mice received a single dose of 2.5 mpk trastuzumab at introduction of the iNK cells (day 0) or multiple doses of 2.5 mpk trastuzumab at 0, 7, and 14 days (as indicated by the arrows) post-introduction of iNK cells.

[0184] FIG. 39B shows tumor burden (median with interquartile range) for the in vivo tumor killing assay described in FIG. 39A. Groups of mice are represented by each horizontal line. Each treatment group had 8 mice. The groups included mice that received unedited (WT) iNK cells, mbIL-15/CD16 (CD16^{+/+}/mbIL-15^{+/+}) DKI iNK cells (DKI iNK), or an isotype control. The mbIL-15/CD16 (CD16^{+/+}/mbIL-15^{+/+}) DKI iNK clone (A2) used corresponds to the A2 clone as identified in FIGS. 35C, 38A, and 38B. The X axis represents time since introduction of NK cells, while the Y axis represents tumor burden as measured by bioluminescent imaging (BLI) using an in vivo imaging system (IVIS).

[0185] FIG. 39C shows tumor burden (median with interquartile range) for the in vivo tumor killing assay described in FIG. 39A. Groups of mice are represented by each horizontal line. Each treatment group had 8 mice. The groups included mice that received unedited (WT) iNK cells+trastuzumab, mbIL-15/CD16 (CD16^{+/+}/mbIL-15^{+/+}) DKI iNK cells (DKI iNK)+trastuzumab, trastuzumab alone, or an isotype control. The mbIL-15/CD16 (CD16^{+/+}/mbIL-15^{+/+}) DKI iNK clones (A2, A4) used correspond to the A2 and A4 clones as identified in FIGS. 35C, 38A, and 38B. Dosing of trastuzumab on day 0 is indicated by the arrow. The X axis represents time since introduction of NK cells, while the Y axis represents tumor burden as measured by bioluminescent imaging (BLI) using an in vivo imaging system (IVIS).

[0186] FIG. 39D shows the survival of mice subjected to the in vivo tumor killing assay described in FIG. 39A. Groups of mice are represented by each horizontal line. Mice dosed with mbIL-15/CD16 (CD16^{+/+}/mbIL-15^{+/+}) DKI iNK cells in combination with trastuzumab (DKI iNK+Tras.×1) had significantly prolonged survival compared to mice dosed with trastuzumab alone (Trastuzumab×1). The X axis represents time since introduction of NK cells, while the Y axis represents percent survival of the mice. ****p<0.0001 (Log-rank Mantel-Cox test).

[0187] FIG. 39E shows tumor burden (median with interquartile range) for the in vivo tumor killing assay described in FIG. 39A. Groups of mice are represented by each horizontal line. Each treatment group had 8 mice. The groups included mice that received unedited (WT) iNK cells in combination with trastuzumab (TRA×3), mbIL-15/CD16 (CD16^{+/+}/mbIL-15^{+/+}) DKI iNK cells in combination with trastuzumab (TRA×3), trastuzumab (TRA×3) alone, or an isotype control. The mbIL-15/CD16 (CD16^{+/+}/mbIL-15^{+/+}) DKI iNK clone used corresponds to the A2 clone as identified in, e.g., FIGS. 35C, 38A, and 38B. Mice dosed with the mbIL-15/CD16 (CD16^{+/+}/mbIL-15^{+/+}) DKI iNK cells+trastuzumab had significantly decreased tumor burden as compared to mice dosed with WT iNK cells+trastuzumab. Doses of trastuzumab on day 0, 7, and 14 are indicated by the arrows. The X axis represents time since introduction of NK cells, while the Y axis represents tumor burden as measured by bioluminescent imaging (BLI) using an in vivo imaging system (IVIS). ***p<0.001 (unpaired t-test).

[0188] FIG. 39F shows the survival of mice subjected to the in vivo tumor killing assay described in FIG. 39A. Groups of mice are represented by each horizontal line. Mice dosed with mbIL-15/CD16 (CD16^{+/+}/mIL-15^{+/+}) DKI iNK cells in combination with trastuzumab (×3) had significantly prolonged survival compared to mice dosed with WT iNK cells in combination with trastuzumab (×3). Additionally, mice dosed with either mbIL-15/CD16 (CD16^{+/+}/mIL-15^{+/+}) DKI iNK cells+trastuzumab (×3) or WT iNK cells+trastuzumab (×3) had a significantly greater probability of survival as compared to trastuzumab alone (TRA×3, TRA×1). The X axis represents time since introduction of NK cells, while the Y axis represents percent survival of the mice. *p<0.05 (unpaired t-test).

[0189] FIG. 39G shows measured tumor burden per mouse on day 33 of the in vivo tumor killing assay described in FIG. 39A. The left panel depicts data for mice receiving a single dose of trastuzumab (on day 0 post-introduction of iNK cells). The right panel depicts data for mice receiving three doses of trastuzumab (on days 0, 7, and 14 post-introduction of iNK cells). The X axis denotes the treatment group, while the Y axis represents tumor burden as measured by bioluminescent imaging (BLI) using an in vivo imaging system (IVIS). **p<0.01, ****p<0.0001, ns denotes not significant (unpaired t-test).

[0190] FIG. 39H shows measured tumor burden per mouse on day 11 (left panel) and day 54 (right panel) of the in vivo tumor killing assay described in FIG. 39A. Mice dosed with mbIL-15/CD16 (CD16^{+/+}/mIL-15^{+/+}) DKI iNK cells in combination with trastuzumab (DKI iNK+Tras.×1) had significantly reduced tumor burden at day 11 and at day 54 as compared to mice dosed with unedited iNK cells in combination with trastuzumab or trastuzumab alone. The X axis denotes the treatment group, while the Y axis represents tumor burden as measured by bioluminescent imaging (BLI) using an in vivo imaging system (IVIS). ***p<0.001, ****p<0.0001 (Mann-Whitney test).

[0191] FIG. 39I shows representative bioluminescent imaging of mice subjected to the in vivo tumor killing assay described in FIG. 39A. The treatment groups of the mice are denoted along the top of the panel, while the time since introduction of NK cells is denoted along the left side of the panel. Each treatment group had 8 mice. The table below the images displays the number of tumor free mice/total mice in the treatment group (from top of panel) at day 40 post-introduction of NK cells. The bottom color scale represents the radiance (p/sec/cm²/sr) of the bioluminescence (from a minimum of 2.30×10⁵ to a maximum of 3.72×10⁷) as seen in the images.

[0192] FIG. 39J depicts flow cytometry data of cells obtained by peritoneal lavage of mice subjected to the in vivo tumor killing assay described in FIG. 39A. The top row shows representative data following sacrifice at day 144 from mice that received WT iNK cells+trastuzumab (×3) according to the in vivo tumor killing assay as described in FIG. 39A. The bottom row shows representative data following sacrifice at day 144 from mice that received mbIL-15/CD16 (CD16^{+/+}/mIL-15^{+/+}) DKI iNK cells+trastuzumab (×3) according to the in vivo tumor killing assay as described in FIG. 39A. iNK cells (inset boxes in top left and bottom left) were identified by flow cytometry using the human CD45 (hCD45) marker and further analyzed for expression of human CD16 (hCD16) and human CD56 (hCD56). The data highlights that the mbIL-15/CD16 (CD16^{+/+}/mIL-15^{+/+}) DKI iNK cells persist in vivo for at least 144 days and almost all of these cells continue to express CD16 on their surface.

[0193] FIG. 40 shows microscopy of cell morphology and flow cytometry of pluripotency markers of human induced pluripotent stem cells (hiPSCs) grown in various media in the absence or presence of Activin A (1 ng/ml or 4 ng/ml ActA).

[0194] FIG. 41 shows morphology of TGFβRII knockout hiPSCs (clone 7) or CISH/TGFβRII DKO hiPSCs (clone 7) cultured in media with or without Activin A (1 ng/mL, 2 ng/mL, 4 ng/mL, or 10 ng/ml).

[0195] FIG. 42 shows morphology of TGFβRII knockout hiPSCs (clone 9) cultured in media with or without Activin A (1 ng/ml, 2 ng/mL, 4 ng/ml, or 10 ng/ml).

[0196] FIG. 43A shows the bulk editing rates at the CISH and TGFβRII loci for single knockout and double knockout hiPSCs.

[0197] FIG. 43B shows expression of Oct4 and SSEA4 in TGFβRII knockout hiPSCs, CISH knockout hiPSCs, and double knockout hiPSCs cultured in Activin A.

[0198] FIG. 44 shows expression of Nanog and Tra-1-60 in TGFβRII knockout hiPSCs, CISH knockout hiPSCs, and double knockout hiPSCs cultured in Activin A.

[0199] FIG. 45 is a schematic of the procedure related to the STEMdiff™ Trilineage Differentiation Kit (STEMCELL Technologies Inc.).

[0200] FIG. 46A shows expression of differentiation markers of TGFβRII knockout hiPSCs, CISH knockout hiPSCs, and double knockout hiPSCs cultured in Activin A.

[0201] FIG. 46B shows karyotypes of TGFβRII/CISH double knockout hiPSCs cultured in Activin A.

[0202] FIG. 46C shows an expanded Activin A concentration curve performed on an unedited parental PSC line, an edited TGFβRII KO clone (C7), and an additional representative (unedited) cell line designated RUCDR. The minimum concentration of Activin A required to maintain each line varied slightly with the TGFβRII KO clone requiring a higher baseline amount of Activin A as compared to the parental control (0.5 ng/ml vs 0.1 ng/ml).

[0203] FIG. 46D shows the stemness marker expression in an unedited parental PSC line, an edited TGFβRII KO clone (C7), and an unedited RUCDR cell line, when cultured with the base medias alone (no supplemental Activin A). The TGFβRII KO iPSCs did not maintain stemness marker expression while the two unedited lines were able to maintain stemness marker expression in E8.

[0204] FIG. 47A is a schematic representation of an exemplary method for creating edited iPSC clones, followed by the differentiation to and characterization of enhanced CD56+ iNK cells.

[0205] FIG. 47B is a schematic of an iNK cell differentiation process utilizing STEMDiff APEL2 during the second stage of the differentiation process.

[0206] FIG. 47C is a schematic of an iNK cell differentiation process utilizing NK-MACS with 15% serum during the second stage of the differentiation process.

[0207] FIG. 47D shows the fold-expansion of unedited PCS-derived iNK cells and the percentage of iNK cells expressing CD45 and CD56 at day 39 of differentiation when differentiated using NK-MACS or Apel2 methods as depicted in FIG. 47C and FIG. 47B respectively.

[0208] FIG. 47E shows in the upper panel a heat map of the surface expression phenotypes (measured as a percentage of the population) of differentiated iNK cells derived from unedited PCS iPSCs when differentiated using NK-MACS or APEL2 methods as depicted in FIG. 47C and FIG. 47B respectively. The bottom panel displays representative histogram plots to illustrate the differences in the iNKs generated by the two methods.

[0209] FIG. 47F shows a heat map of the surface expression phenotypes (measured as a percentage of the population) of differentiated edited iNKs (TGFβRII knockout, CISH knockout, and double knockout (DKO)) and unedited parental iPSCs (WT) when differentiated using NK-MACS or APEL2 methods as depicted in FIG. 47C and FIG. 47B respectively.

[0210] FIG. 47G shows unedited iNK cell effector function when differentiated using NK-MACS or APEL2 methods as depicted in FIG. 47C and FIG. 47B respectively.

[0211] FIG. 48 shows differentiation phenotypes of edited clones (TGFβRII knockout, CISH knockout, and double knockout) as compared to parental wild type clones.

[0212] FIG. 49 shows surface expression phenotype of edited iNKs (TGFβRII knockout, CISH knockout, and double knockout) as compared to parental clone iNKs and wild type cells.

[0213] FIG. 50A shows surface expression phenotype of edited iNKs (TGFβRII knockout, CISH knockout, and double knockout) as compared to parental clone iNKs (“WT”) and peripheral blood-derived natural killer cells.

[0214] FIG. 50B is a flow cytometry histogram plot that shows the surface expression phenotype of edited iNK cells (TGFβRII/CISH double knockout) as compared to parental clone iNK cells (“unedited iNK cells”).

[0215] FIG. 50C shows surface expression phenotypes (measured as a percentage of the population) of edited iNK cells (TGFβRII/CISH double knockout) as compared to parental clone iNK cells (“unedited iNK cells”) at day 25, day 32, and day 39 post-hiPSC differentiation (average values from at least 5 separate differentiations).

[0216] FIG. 50D shows pSTAT3 expression phenotypes (measured as a percentage of the population) of edited CD56+ iNK cells (“CISH KO iNKs”) as compared to parental clone CD56+ iNK cells (“unedited iNKs”) at 10 minutes and 120 minutes following IL-15 induced activation. Briefly, the day 39 or day 40 iNKs are plated the day before in a cytokine starved condition. The next day the cells are stimulated with 10 ng/ml of IL 15 for the length of time indicated. The cells are fixed immediately at the end of the time point, stained for CD56 followed by an intracellular stain. The cells were processed on a NovoCyte Quanteon and the data was analyzed in FlowJo. Data shown is a representative experiment of >3 experiments performed.

[0217] FIG. 50E shows pSMAD2/3 expression phenotypes (measured as a percentage of the population) of edited CD56+ iNK cells (TGFβRII/CISH double knockout, “DKO iNKs”) as compared to parental clone CD56+ iNK cells (“unedited iNK cells”) at 10 minutes and 120 minutes following IL-15 and TGF-β induced activation. Briefly, the day 39 or day 40 iNKs were plated the day before in a cytokine starved condition. The next day the cells were stimulated with 10 ng/ml of IL-15 and 50 ng/ml of TGF-β for the length of time indicated. The cells were fixed immediately at the end of the time point, stained for CD56 followed by an intracellular stain. The cells were processed on a NovoCyte Quanteon and the data was analyzed in FlowJo. Data shown is a representative experiment of >3 experiments performed.

[0218] FIG. 50F shows IFN-γ expression phenotypes (measured as a percentage of the population) of edited CD56+ iNK cells (TGFβRII/CISH double knockout, “DKO IFNg”) as compared to parental clone CD56+ iNK cells (unedited iNKs, “WT IFNg”) with or without phorbol myristate acetate (PMA) and ionomycin (IMN) stimulation. The data is representative. It is generated from a single differentiation and each condition in the assay is run with 2 technical replicates. **p<0.05 vs unedited iNK cells (paired t test).

[0219] FIG. 50G shows TNF-α expression phenotypes (measured as a percentage of the population) of edited CD56+ iNK cells (TGFβRII/CISH double knockout, “DKO TNF a”) as compared to parental clone CD56+ iNK cells (unedited iNK cells, “WT TNFa”) with or without Phorbol myristate acetate (PMA) and Ionomycin (IMN) stimulation. The data is representative. It is generated from a single differentiation and each condition in the assay is run with 2 technical replicates. **p<0.05 vs unedited iNK cells (paired t test).

[0220] FIG. 51A is a schematic representation of an exemplary solid tumor cell killing assay, depicting the use of edited iNK cells (TGFβRII/CISH double knockout) to kill SK-OV-3 ovarian cells in the presence or absence of IL-15 and TGF-β.

[0221] FIG. 51B shows the results of a solid tumor killing assay as described in FIG. 51A. iNK cells function to reduce tumor cell spheroid size. Certain edited iNK cells (CISH single knockout, “CISH_2, 4, 5, and 8”) were not significantly different from the parental clone iNK cells (“WT_2”), while certain edited iNK cells (TGFβRII single knockout, “TGFβRII_7”, and TGFβRII/CISH double knockout “DKO”) functioned significantly better at effector-target (E:T) ratios of 1 or greater when measured in the presence of TGF-β as compared to parental clone iNK cells (“WT_2”). ****p<0.0001 vs unedited iNK cells (two-way ANOVA, Sidak's multiple comparisons test).

[0222] FIG. 51C shows edited iNK cell effector function as compared to unedited iNK cells.

[0223] FIG. 52 shows the results of an in-vitro serial killing assay, where iNK cells are serially challenged with hematological cancer cells (e.g., Nalm6 cells) in the presence of 10 ng/ml of IL-15 and 10 ng/ml of TGF-β; the X axis represents time, with tumor cells being added every 48 hours, while the Y axis represents killing efficacy as measured by normalized total red object area (e.g., presence of tumor cells). The data shows that edited iNK cells (TGFβRII/CISH double knockout) continue to kill hematological cancer cells while unedited iNK cells lose this function at equivalent time points.

[0224] FIG. 53 shows surface expression phenotypes (measured as a percentage of the population) of certain edited iNK clonal cells (CISH single knockout “CISH_C2, C4, C5, and C8”, TGFβRII single knockout “TGFβRII-C7”, and TGFβRII/CISH double knockout “DKO-C1”) as compared to parental clone iNK cells (“WT”) at day 25, day 32, and day 39 post-hiPSC differentiation when cultured in the presence of 1 ng/ml or 10 ng/ml IL-15.

[0225] FIG. 54A is a schematic of an in-vivo tumor killing assay. Mice were intraperitoneally inoculated with 1×10⁶ SKOV3-luc cells, mice are randomized, and 4 days later, 20×10⁶ iNK cells were introduced intraperitoneally. Mice were followed for up to 60 days post-tumor implantation. The X axis represents time since implantation, while the Y axis represents killing efficacy as measured by total bioluminescence (p/s).

[0226] FIG. 54B shows the results of an in-vivo tumor killing assay as described in FIG. 54A. An individual mouse is represented by each horizontal line. The data show that both unedited iNK cells (“unedited iNK”) and DKO edited iNK cells (TGFβRII/CISH double knockout) prevent tumor growth better than vehicle, while edited iNK cells kill tumor cells significantly better than vehicle in-vivo. Each experimental group had 9 animals each. ***p<0.001, ****p<0.0001 by a 2-way ANOVA analysis.

[0227] FIG. 54C shows the averaged results with standard error of the mean of the in-vivo tumor killing assay described in FIG. 54B. Populations of mice are represented by each horizontal line. The data show that DKO edited iNK cells (TGFβRII/CISH double knockout) prevent tumor growth and kill tumor cells significantly better than vehicle or unedited iNK cells in-vivo. ***p<0.001, ****p<0.0001 by a 2-way ANOVA analysis.

[0228] FIG. 55A shows surface expression phenotypes (measured as a percentage of the population) of bulk edited iNK cells (left panel—ADORA2A single knockout) or certain edited iNK clonal cells (right panel—ADORA2A single knockout) as compared to parental clone iNK cells (“PCS_WT”) at day 25, day 32, and day 39 or at day 28, day 36, and day 39 post-hiPSC differentiation. Representative data from multiple differentiations.

[0229] FIG. 55B shows cyclic AMP (cAMP) concentration phenotypes following 5′-(N-Ethylcarboxamido)adenosine (“NECA”, adenosine agonist) activation for edited iNK clonal cells (ADORA2A single knockout) as compared to parental clone iNK cells (“unedited iNKs”). The Y axis represents average cAMP concentration in nM (a proxy for ADORA2A activation), while the X axis represents NECA concentration in nM.

[0230] FIG. 55C shows the results of an in-vitro serial killing assay, where iNK cells are serially challenged with hematological cancer cells (e.g., Nalm6 cells) in the presence of 100 μM NECA, and 10 ng/ml of IL-15; the X axis represents time, with tumor cells being added every 48 hours, while the Y axis represents killing efficacy as measured by total red object area (e.g., presence of tumor cells). The data shows that edited iNK cells (“ADORA2A KO INK”) kill hematological cancer cells more effectively than unedited iNK cells (“Ctrl iNK”) under conditions that mimic adenosine suppression.

[0231] FIG. 56A shows surface expression phenotypes (measured as a percentage of the population) of certain edited iNK clonal cells (TGFβRII/CISH/ADORA2A triple knockout, “CRA_6” and “CR+A_8”) as compared to parental clone iNK cells (“WT_2”) at day 25, day 32, and day 39 post-hiPSC differentiation. Data is representative of multiple differentiations.

[0232] FIG. 56B shows cyclic AMP (cAMP) concentration phenotypes following NECA (adenosine agonist) activation for edited iNK clonal cells (TGFβRII/CISH/ADORA2A triple knockout, “TKO iNKs”) as compared to parental clone iNK cells (“unedited iNKs”). The Y axis represents average cAMP concentration in nM (a proxy for ADORA2A activation), while the X axis represents NECA concentration in nM.

[0233] FIG. 56C shows the results of a solid tumor killing assay as described in FIG. 51A without IL-15. iNK cells function to reduce tumor cell spheroid size. The Y axis measures total integrated red object (e.g., presence of tumor cells), while the X axis represents the effector to target (E:T) cell ratio. The edited iNK cells (ADORA2A single knockout “ADORA2A”, TGFβRII/CISH double knockout “DKO”, or TGFβRII/CISH/ADORA2A triple knockout “TKO”) had lower EC50 rates when measured in the presence of TGF-β as compared to parental clone iNK cells (“Control”) (average values from at least 3 separate differentiations).

[0234] FIG. 57 shows the results of guide RNA selection assays for the loci TGFβRII, CISH, ADORA2A, TIGIT, and NKG2A utilizing in-vitro editing in iPSCs.

[0235] FIG. 58A depicts an exemplary flow cytometry chart for a population of T cells transduced by AAV6 comprising a CD19 CAR cargo targeted for knock-in at GAPDH at 5E4 MOI but without the addition of an RNP.

[0236] FIG. 58B depicts an exemplary flow cytometry chart for a population of T cells transduced by AAV6 comprising a CD19 CAR cargo targeted for knock-in at GAPDH at 5E4 MOI and transformed with 1 μM of RNPs comprising Cas12a (SEQ NO: 62) and RSQ22337.

[0237] FIG. 58C depicts exemplary expansion and viability data for a population of T cells transduced by AAV6 as described in FIG. 58A and FIG. 58B.

[0238] FIG. 58D depicts an exemplary flow cytometry chart for a population of T cells that have been transformed with RNPs targeting the TRAC locus.

[0239] FIG. 58E depicts an exemplary flow cytometry chart for a population of T cells transduced by AAV6 comprising a CD19 CAR cargo targeted for knock-in at GAPDH at 5E4 MOI and transformed with 4 μM of RNPs comprising Cas12a (SEQ NO: 62) and RSQ22337 and RNPs targeting the TRAC locus.

[0240] FIG. 58F depicts a histogram showing genotype data derived from exemplary flow cytometry experiments on populations of T cells transformed with TRAC targeting RNPs, GAPDH targeting RNPs, and/or transduced with AAV6 comprising a CD19 CAR cargo targeted for knock-in at GAPDH. T cells that have CD19 CAR KI were observed at rates greater than 90% when cells were transformed with GAPDH targeting RNPs and transduced with AAV6 comprising the CD19 CAR cargo targeting GAPDH. T cells that have TRAC KO and CD19 CAR KI were observed at rates greater than 80% when cells were transformed with TRAC targeting RNPs, GAPDH targeting RNPs, and transduced with AAV6 comprising a CD19 CAR cargo targeting GAPDH.

[0241] FIG. 58G depicts an exemplary flow cytometry chart for a population of T cells transduced by AAV6 comprising a CD19 CAR cargo targeted for knock-in at GAPDH at 5E4 MOI and transformed with 4 μM of RNPs comprising Cas12a (SEQ NO: 62) with RSQ22337, TRAC targeting RNPs, and TGFBR2 targeting RNPs.

[0242] FIG. 58H depicts a histogram showing genotype data derived from exemplary flow cytometry experiments on populations of T cells transformed with GAPDH targeting RNPs (comprising Cas12a (SEQ ID NO: 62) and RSQ22337), and transduced with AAV6 comprising a GFP cargo targeted for knock-in at GAPDH, a CD19 CAR cargo targeted for knock-in at GAPDH, or an HLA-E alloshield cargo targeted for knock-in at GAPDH. Transgene integration efficiencies greater than 80% at the GAPDH locus were observed for each population of edited T cells.

[0243] FIG. 58I shows the results of an in-vitro tumor cell killing assay, where T cells comprising CD19 CAR knock-in at the GAPDH gene were challenged with hematological cancer cells (e.g., Raji cells). Significant Raji cell cytolysis was observed in test samples when compared to control samples comprising cancer cells only or when compared to T cells comprising GFP knock-in at the GAPDH gene that were challenged with Raji cells. N=4, 1 biological replicate in 4 technical replicates, shown are the mean and standard error of the mean, statistical analysis with one-way ANOVA provides a P value of <0.0001.

[0244] FIG. 58J shows the results of an in-vitro tumor cell killing assay, where T cells comprising CD19 CAR knock-in at the GAPDH gene in combination with TRAC and/or TGFBR2 knock-out were challenged with hematological cancer cells (e.g., Raji cells). As compared to T cells comprising GFP knock-in at the GAPDH gene or unedited T cells, significant cytotoxicity was observed with T cells comprising the CD19 CAR knock-in as assessed by LDH release following 24 hours of co-culture at an E:T of 2. Average spontaneous LDH release by Raji cells (dashed horizontal line) and average LDH released upon treatment with lysis buffer (solid horizontal line) provided for comparison. Each filled circle represents data from four technical replicates from one biological sample. The X axis denotes T cell group, while the Y axis quantifies LDH release as relative fluorescence units (RFUs) as detected using a plate reader with an excitation of 560 nm and emission of 590 nm. Black lines represent means. Not significant (n.s.), ***p<0.001, ****p<0.0001 (unpaired t-test).

[0245] FIG. 59 depicts HLA-E surface expression in T cells modified as described herein. Left panel depicts HLA-E surface expression in T cells transduced with AAV6 comprising a B2M-HLA-E cargo targeted for knock-in at GAPDH at 5E4 MOI and transformed with 1 μM of RNPs comprising Cas12a (SEQ NO: 62) with RSQ22337, compared to mock transduced control cells (no AAV6 transduction). Right panel depicts expansion data for T cells comprising knock-in of the B2M-HLA-E cargo at GAPDH and expansion data for the mock transduced control T cells. Cells were stained with PE anti-human HLA-E antibody clone: 3D12 (1:100 dilution).

[0246] FIG. 60A is a comparison of T cells modified as described herein utilizing either a one-step or a sequential process, wherein a combination of RNPs targeting different loci are administered to the T cells either together (one step) or sequentially. The left panel depicts exemplary flow cytometry data from T cells that have undergone a one-step electroporation for transformation with RNPs targeting TRAC, B2M, and GAPDH (0.5 μM of each type of RNP) combined with transduction with AAV6 comprising a GFP cargo targeted for knock-in at GAPDH at 5E4 MOI. The right panel depicts exemplary flow cytometry data from T cells that have undergone a series of electroporations for transformation wherein RNPs targeting GAPDH (at 5 μM) were administered to the cells along with transduction with AAV6 comprising a GFP cargo targeted for knock-in at GAPDH at 5E4 MOI, followed four days later by transformation with RNPs targeting TRAC, and RNPs targeting B2M at 0.5 μM of each RNP. Flow cytometry data assayed the number of cells that had at least TRAC knocked-out, the number of cells that had at least B2M knocked-out, and the number of cells that had both TRAC and B2M knocked-out and also exhibited GFP expression. These results show one-step KO/KI has comparable efficiency when compared to sequential KI and KO processes.

[0247] FIG. 60B depicts the total number of editing events found in T cells modified as described herein using a one-step process comprising transforming a population of T cells with RNPs targeting TRAC, B2M, CIITA, TGFBR2, and GAPDH (comprising Cas12a (SEQ ID NO: 62) and RSQ22337, and transducing the cells with an AAV6 comprising a GFP cargo targeted for knock-in at the GAPDH gene. Each editing event (KO or cargo KI) occurred at an individual rate of greater than 80%.

[0248] FIG. 61A depicts an exemplary flow cytometry chart for a population of NK cells transduced by AAV6 comprising a GFP cargo targeted for knock-in at GAPDH at 5E4 MOI but without the addition of an RNP.

[0249] FIG. 61B depicts an exemplary flow cytometry chart for a population of NK cells transduced by AAV6 comprising a GFP cargo targeted for knock-in at GAPDH at 5E4 MOI and transformed with 4 μM of RNPs comprising Cas12a (SEQ NO: 62) and RSQ22337.

[0250] FIG. 61C depicts an exemplary flow cytometry chart for a population of NK cells transduced by AAV6 comprising a CD19 CAR cargo targeted for knock-in at GAPDH at 5E4 MOI but without the addition of an RNP.

[0251] FIG. 61D depicts an exemplary flow cytometry chart for a population of NK cells transduced by AAV6 comprising a CD19 CAR cargo targeted for knock-in at GAPDH at 5E4 MOI and transformed with 4 μM of RNPs comprising Cas12a (SEQ NO: 62) and RSQ22337.

[0252] FIG. 61E depicts a histogram showing genotype data derived from exemplary flow cytometry experiments on populations of NK cells transformed with GAPDH targeting RNPs (comprising Cas12a (SEQ ID NO: 62) and RSQ22337) and transduced with AAV6 comprising either a GFP cargo targeted for knock-in at GAPDH at 5E4 MOI or a CD19 CAR cargo targeted for knock-in at GAPDH. Transgene integration efficiencies greater than 80% at the GAPDH locus were observed in each edited NK cell population.

[0253] FIG. 61F shows the results of an in vitro tumor cell killing assay, where NK cells comprising CD19 CAR knock-in at the GAPDH gene were challenged with hematological cancer cells (Raji cells). Significantly greater Raji cell cytolysis was observed in edited NK cells comprising CD19 CAR KI when compared to control NK cells (unedited). N=3, 1 biological replicate in 3 technical replicates, shown are the mean and standard error of the mean, statistical analysis with one-way ANOVA provides a P value of <0.05.

[0254] FIG. 61G shows the results of an in vitro tumor killing assay, where NK cells comprising CD19 CAR knock-in (KI) or GFP knock-in (KI) at the GAPDH gene were challenged with hematological cancer cells (Nalm6 cells). Significantly greater cytotoxicity was observed with NK cells comprising the CD19 CAR knock-in than the GFP knock-in as assessed by BATDA release following 2 hours of co-culture at an E:T of 1. Average spontaneous BATDA release by Nalm6 cells (dashed horizontal line) and average BATDA released upon treatment with lysis buffer (solid horizontal line) provided for comparison. Each filled circle represents data from eight technical replicates from one biological sample. The X axis denotes NK cell group, while the Y axis quantifies BATDA release as relative fluorescence units (RFUs) as detected by a time-resolved fluorometer. Black horizontal lines represent means. ****p<0.0001 (unpaired t-test).

[0255] FIG. 62A shows the results of an in vitro persistence assay of mbIL-15/CD16 (CD16^{+/+}/mbIL-15^{+/+}) DKI/CISH/TGFβRII DKO (DKI/DKO) iNK cells and unedited (WT) iNK cells. The X axis represents days since removal of exogenous cytokine support, while the Y axis represents the total number of live cells.

[0256] FIG. 62B shows averaged results of an in vitro persistence assay of mbIL-15/CD16 (CD16^{+/+}/mbIL-15^{+/+}) DKI/CISH/TGFβRII DKO (DKI/DKO) iNK cells and CD16/mbIL-15 DKI (DKI) iNK cells. The X axis represents days since removal of exogenous cytokine support, while the Y axis represents the total number of live cells.

[0257] FIG. 63A shows averaged results of an in vitro tumor cell killing assay where mbIL-15/CD16 (CD16^{+/+}/mbIL-15^{+/+}) DKI/CISH/TGFβRII DKO (DKI/DKO) iNK cells with or without 10 μg/ml cetuximab (CTX) were added to Detroit-562 (pharyngeal carcinoma) cells at various E:T ratios (e.g., 1:1, 5:1, 10:1). The X axis represents time in hours:minutes:seconds from initial seeding of the Detroit-562 cells, while the Y axis represents percent cytolysis as measured by electrical impedance. N=3, error bars represent standard deviation.

[0258] FIG. 63B shows averaged results of an in vitro tumor cell killing assay where mbIL-15/CD16 (CD16^{+/+}/mbIL-15^{+/+}) DKI/CISH/TGFβRII DKO (DKI/DKO) iNK cells with or without 10 μg/ml cetuximab (CTX) were added to FaDu (pharyngeal carcinoma) cells at various E:T ratios (e.g., 1:1, 5:1, 10:1). The X axis represents time in hours:minutes:seconds from initial seeding of the FaDu cells, while the Y axis represents percent cytolysis as measured by electrical impedance. N=3, error bars represent standard deviation.

[0259] FIG. 63C shows averaged results of an in vitro tumor cell killing assay where mbIL-15/CD16 (CD16^{+/+}/mbIL-15^{+/+}) DKI/CISH/TGFβRII DKO (DKI/DKO) iNK cells with or without 10 μg/ml cetuximab (CTX) were added to HT29 (colorectal adenocarcinoma) cells at various E:T ratios (e.g., 1:1, 5:1, 10:1). The X axis represents time in hours:minutes:seconds from initial seeding of the HT29 cells, while the Y axis represents percent cytolysis as measured by electrical impedance. N=3, error bars represent standard deviation.

[0260] FIG. 63D shows averaged results of an in vitro tumor cell killing assay where mbIL-15/CD16 (CD16^{+/+}/mbIL-15^{+/-}) DKI/CISH/TGFβRII DKO (DKI/DKO) iNK cells with or without 10 μg/ml cetuximab (CTX) were added to HCT116 (colorectal carcinoma) cells at various E:T ratios (e.g., 1:1, 5:1, 10:1). The X axis represents time in hours:minutes:seconds from initial seeding of the HCT116 cells, while the Y axis represents percent cytolysis as measured by electrical impedance. N=3, error bars represent standard deviation.

[0261] FIG. 64A shows averaged results of an in vitro tumor cell killing assay where mbIL-15/CD16 (CD16^{+/+}/mbIL-15^{+/+}) DKI/CISH/TGFβRII DKO (DKI/DKO) iNK cells or unedited (WT) iNK cells added to HT29 (colorectal adenocarcinoma) cells at an E:T ratio of 10:1. The X axis represents time in hours:minutes:seconds from initial seeding of the HT29 cells, while the Y axis represents percent cytolysis as measured by electrical impedance. N=3, error bars represent standard deviation.

[0262] FIG. 64B shows results of an in vitro persistence assay of mbIL-15/CD16 (CD16^{+/+}/mbIL-15^{+/+}) DKI/CISH/TGFβRII DKO (DKI/DKO) iNK cells and unedited (WT) iNK cells. DKI/DKO or WT iNK cells were co-cultured with HT-29 cells for 4 days at a 10:1 E:T ratio. The X axis denotes evaluation category (e.g., percentage of live NK cells of all cells, percentage of CD16+ live NK cells), while the Y axis represents the percentage as measured by flow cytometry. Black horizontal lines represent means.

[0263] FIG. 64C depicts exemplary flow cytometry data from before and after an in vitro persistence assay of mbIL-15/CD16 (CD16^{+/+}/mbIL-15^{+/+}) DKI/CISH/TGFβRII DKO (DKI/DKO) iNK cells and unedited (WT) iNK cells. DKI/DKO or WT iNK cells were co-cultured with HT-29 cells for 4 days at a 1:1 E:T ratio.

[0264] FIG. 65A shows exemplary flow cytometry data from unedited (WT) iNK cells or mbIL-15/CD16 (CD16^{+/+}/mbIL-15^{+/+}) DKI/CISH/TGFβRII DKO (DKI/DKO) iNK cells. The data highlights the efficiency of integration and expression of knock-in cassettes comprising a CD16 and IL-15Rα protein encoding cargo sequence. The X axis denotes whether the selected gene is CD16 or IL-15Rα, while the Y axis quantifies the percentage of cells from the noted population that are expressing the selected gene. Horizontal lines represent group means. N=1, ****p<0.0001 (two-way ANOVA).

[0265] FIG. 65B shows the results of 3D tumor spheroid killing assays conducted as depicted in FIG. 20. Unedited (WT) iNK cells or mbIL-15/CD16 (CD16^{+/+}/mbIL-15^{+/+}) DKI/CISH/TGFβRII DKO (DKI/DKO) iNK cells were used against SK-OV-3 tumor cells at varying E:T ratios. DKI/DKO or WT iNK cells were co-cultured with the tumor spheroids and imaged every 2 hours to measure red object intensity (a proxy for tumor cell abundance) for up to 4 days. Data were normalized to the red object intensity at time of iNK cell addition. IC50 values based on the left panel are presented in the table in the right panel and highlight the greater efficacy of the DKI/DKO iNK cells in killing tumor cells. The X axis represents time in hours since addition of iNK cells to the tumor spheroid, while the Y axis represents normalized spheroid size as measured by red object intensity. N=1, two technical replicates per cell line.

[0266] FIG. 65C shows the results of a 3D tumor spheroid killing assay conducted as depicted in FIG. 20. Unedited (WT) iNK cells or mbIL-15/CD16 (CD16^{+/+}/mbIL-15^{+/+}) DKI/CISH/TGFβRII DKO (DKI/DKO) iNK cells were used against SK-OV-3 tumor cells at varying E:T ratios and in the presence of either 10 μg/ml trastuzumab or IgG (control). DKI/DKO or WT iNK cells were co-cultured with the tumor spheroids and imaged every 2 hours to measure red object intensity (a proxy for tumor cell abundance) for up to 4 days. DKI/DKO iNK cells demonstrate significantly greater antibody-dependent cellular cytotoxicity (ADCC) than WT iNK cells. The X axis represents treatment group, while the Y axis represents the calculated IC50 (e.g., the E:T ratio required to reduce the SK-OV-3 spheroids by 50% after 100 hours of killing). Data represents 11 independent experiments. ****p<0.0001 (unpaired t-test).

[0267] FIG. 65D shows the results of an in vitro persistence assay of unedited (WT) iNK cells and mbIL-15/CD16 (CD16^{+/+}/mbIL-15^{+/+}) DKI/CISH/TGFβRII DKO (DKI/DKO) INK cells in the absence of the cytokines IL-2 and IL-15. The X axis represents days in culture since removal of exogenous cytokine support, while the Y axis represents viability as the percentage of live cells. N=1, two technical replicates per cell line, error bars represent standard deviation.

[0268] FIG. 65E shows the results of an in vitro SMAD2/3 phosphorylation assay of unedited (WT) iNK cells and mbIL-15/CD16 (CD16^{+/+}/mbIL-15^{+/+}) DKI/CISH/TGFβRII DKO (DKI/DKO) iNK cells following treatment with TGFβ (TGFb). DKI/DKO iNK cells or WT iNK cells were plated in a cytokine starved condition and 10 ng/ml of TGFβ was added to the iNK cells the following day. Cells were immediately fixed following the time indicated. The X axis represents time in minutes since addition of the TGFB, while the Y axis represents normalized level of SMAD2/3 phosphorylation. Data represents one independent experiment. Dashed horizontal line represents level of SMAD2/3 phosphorylation following treatment with vehicle.

[0269] FIG. 65F shows the results of a 3D tumor spheroid killing assay conducted as depicted in FIG. 20. Unedited (WT) iNK cells or mbIL-15/CD16 (CD16^{+/+}/mbIL-15^{+/+}) DKI/CISH/TGFβRII DKO (DKI/DKO) iNK cells were used against SK-OV-3 tumor cells at an E:T ratio of 31.6 and in the presence of either 10 ng/ml TGFβ or IgG (control). DKI/DKO or WT iNK cells were co-cultured with the tumor spheroids and imaged every 2 hours to measure red object intensity (a proxy for tumor cell abundance) for up to 100 days. Results for the DKI/DKO iNK cells are displayed in the left panel, while the results for the WT iNK cells are displayed in the right panel. The X axis represents time in hours since addition of iNK cells to the tumor spheroid, while the Y axis represents normalized spheroid size as measured by red object intensity. N=1.

[0270] FIG. 65G shows the results of an in vitro serial killing assay where unedited (WT) iNK cells or mbIL-15/CD16 (CD16^{+/+}/mbIL-15^{+/+}) DKI/CISH/TGFβRII DKO (DKI/DKO) INK cells were challenged with Nalm6 tumor cells. At day 0, 10×10³ Nalm6 tumor cells and 2×10⁵ iNK cells were plated together in the presence of 10 ng/ml TGFB. At 48 hour intervals, a bolus of 5×10³ Nalm6 tumor cells was added to re-challenge the iNK cell population. The X axis represents the number of challenges that occurred, while the Y axis represents the tumor burden as measured by red object intensity. N=1, three technical replicates per cell line, error bars represent standard deviation.

[0271] FIG. 66A is a schematic of an in vivo tumor killing assay. Mice were intravenously (IV) inoculated with 0.125×10⁶ (0.125e6) SKOV3-luc cells, and following 19 days to allow for tumor establishment, on day −2, mice were imaged to establish pre-treatment tumor burden and randomized into two groups. Two days later, on day 0, a first group of mice intravenously received 20×10⁶ (20e6) mbIL-15/CD16 (CD16^{+/+}/mbIL-15^{-/-}) DKI/CISH/TGFβRII DKO (DKI/DKO) iNK cells in combination with 2.5 mpk trastuzumab (Tras) and a second group of mice intraperitoneally received only 2.5 mpk trastuzumab (Tras). Mice were imaged weekly using an in vivo imaging system (IVIS) to assess tumor burden over time.

[0272] FIG. 66B shows tumor burden (median with interquartile range) for the in vivo tumor killing assay described in FIG. 66A. Groups of mice are represented by each horizontal line. Each treatment group had 4 mice. The groups include mice that received mbIL-15/CD16 (CD16^{+/+}/mbIL-15^{+/+}) DKI/CISH/TGFβRII DKO (DKI/DKO) iNK cells in combination with a single dose of trastuzumab (DKI/DKO iNK+Tras.), a single dose of trastuzumab alone (Tras. Only), or an isotype control. Mice dosed with the DKI/DKO iNK cells in combination with trastuzumab had significantly decreased tumor burden as compared to mice dosed with trastuzumab alone. The dose of trastuzumab on day 0 is indicated by the arrow. The dashed vertical line represents the dose of iNK cells. The X axis represents time in days since introduction of NK cells, while the Y axis represents tumor burden as measured by bioluminescent imaging (BLI) using an in vivo imaging system (IVIS).

[0273] FIG. 66C shows representative bioluminescent imaging of mice subjected to the in vivo tumor killing assay described in FIG. 66A. The treatment groups of the mice are denoted along the top of the panel, while the time since dosing with iNK cells in combination with trastuzumab or trastuzumab alone is denoted along the left side of the panel. Each treatment group had 4 mice. The color scale at the right represents the radiance (p/sec/cm²/sr) of the bioluminescence (from a minimum of 3.94×10⁴ to a maximum of 7.02×10⁵) as seen in the images.

[0274] FIG. 67A is a schematic of an in vivo tumor killing assay. Mice were intraperitoneally inoculated with 0.25×10⁶ SKOV3-luc cells, and following 4 days to allow for tumor establishment, mice were randomized into groups. One day later, some groups of mice intraperitoneally received 5×10⁶ (5E6) unedited (WT) or mbIL-15/CD16 (CD16^{+/+}/mbIL-15^{+/+}) DKI/CISH/TGFβRII DKO (DKI/DKO) iNK cells. In some treatment groups, mice received a dose of 2.5 mpk trastuzumab at 0, 7, and 14 days (as indicated by the arrows) post-introduction of iNK cells, for a total of 3 doses of trastuzumab. Mice were imaged weekly using an in vivo imaging system (IVIS) to assess tumor burden over time.

[0275] FIG. 67B shows tumor burden (median with interquartile range) for the in vivo tumor killing assay described in FIG. 67A. Groups of mice are represented by each horizontal line. Each treatment group had 5-6 mice. The groups included mice that received unedited iNK cells (WT iNK), mbIL-15/CD16 (CD16^{+/+}/mbIL-15^{+/+}) DKI/CISH/TGFβRII DKO INK cells (DKI/DKO iNK), or an isotype control. The X axis represents time since introduction of NK cells, while the Y axis represents tumor burden as measured by bioluminescent imaging (BLI) using an in vivo imaging system (IVIS).

[0276] FIG. 67C shows tumor burden (median with interquartile range) for the in vivo tumor killing assay described in FIG. 67A. Groups of mice are represented by each horizontal line. Each treatment group had 5-6 mice. The groups included mice that received unedited (WT) iNK cells in combination with trastuzumab (WT+Tras.×3), mbIL-15/CD16 (CD16^{+/+}/mbIL-15^{+/+}) DKI/CISH/TGFβRII DKO (DKI/DKO) iNK cells in combination with trastuzumab (DKI DKO+Tras.×3), trastuzumab alone, or an isotype control. Mice dosed with the DKI/DKO iNK cells in combination with trastuzumab had significantly decreased tumor burden as compared to mice dosed with WT iNK cells in combination with trastuzumab or trastuzumab alone. Doses of trastuzumab on day 0, 7, and 14 are indicated by the arrows. The X axis represents time since introduction of NK cells, while the Y axis represents tumor burden as measured by bioluminescent imaging (BLI) using an in vivo imaging system (IVIS). ****p<0.0001 (one-way ANOVA).

[0277] FIG. 67D shows the survival of mice subjected to the in vivo tumor killing assay described in FIG. 67A. Groups of mice are represented by each horizontal line. The X axis represents time since introduction of NK cells, while the Y axis represents percent survival of the mice. *p<0.05, **p<0.01 (Log-rank Mantel-Cox test).

[0278] FIG. 67E shows representative bioluminescent imaging of mice subjected to the in vivo tumor killing assay described in FIG. 67A. The treatment groups of the mice are denoted along the top of the panel, while the time since introduction of NK cells is denoted along the left side of the panel. Each treatment group had 5-6 mice. The table below the images displays the number of mice with complete tumor clearance/total mice in the treatment group (from top of panel) at day 31 post-introduction of NK cells.

### DETAILED DESCRIPTION

### Definitions and Abbreviations

[0279] Unless otherwise specified, each of the following terms have the meaning set forth in this section.

[0280] The indefinite articles “a” and “an” refer to at least one of the associated noun, and are used interchangeably with the terms “at least one” and “one or more.” The conjunctions “or” and “and/or” are used interchangeably as non-exclusive disjunctions.

[0281] The term “cancer” (also used interchangeably with the term “neoplastic”), as used herein, refers to cells having the capacity for autonomous growth, i.e., an abnormal state or condition characterized by rapidly proliferating cell growth. Cancerous disease states may be categorized as pathologic, i.e., characterizing or constituting a disease state, e.g., malignant tumor growth, or may be categorized as non-pathologic, i.e., a deviation from normal but not associated with a disease state, e.g., cell proliferation associated with wound repair.

[0282] The terms “CRISPR/Cas nuclease” as used herein refer to any CRISPR/Cas protein with DNA nuclease activity, e.g., a Cas9 or a Cas12 protein that exhibits specific association (or “targeting”) to a DNA target site, e.g., within a genomic sequence in a cell in the presence of a guide molecule. The strategies, systems, and methods disclosed herein can use any combination of CRISPR/Cas nuclease disclosed herein, or known to those of ordinary skill in the art. Those of ordinary skill in the art will be aware of additional CRISPR/Cas nucleases and variants suitable for use in the context of the present disclosure, and it will be understood that the present disclosure is not limited in this respect.

[0283] The term “differentiation” as used herein is the process by which an unspecialized (“uncommitted”) or less specialized cell acquires the features of a specialized cell such as, for example, a blood cell. In some embodiments, a differentiated or differentiation-induced cell is one that has taken on a more specialized (“committed”) position within the lineage of a cell. For example, an iPS cell (iPSC) can be differentiated into various more differentiated cell types, for example, a hematopoietic stem cell, a lymphocyte, and other cell types, upon treatment with suitable differentiation factors in the cell culture medium. Suitable methods, differentiation factors, and cell culture media for the differentiation of pluri- and multipotent cell types into more differentiated cell types are well known to those of skill in the art. In some embodiments, the term “committed”, is applied to the process of differentiation to refer to a cell that has proceeded through a differentiation pathway to a point where, under normal circumstances, it would or will continue to differentiate into a specific cell type or subset of cell types, and cannot, under normal circumstances, differentiate into a different cell type (other than a specific cell type or subset of cell types) nor revert to a less differentiated cell type.

[0284] The terms “differentiation marker,” “differentiation marker gene,” or “differentiation gene,” as used herein refers to genes or proteins whose expression are indicative of cell differentiation occurring within a cell, such as a pluripotent cell. In some embodiments, differentiation marker genes include, but are not limited to, the following genes: CD34, CD4, CD8, CD3, CD56 (NCAM), CD49, CD45, NK cell receptor (cluster of differentiation 16 (CD16)), natural killer group-2 member D (NKG2D), CD69, NKp30, NKp44, NKp46, CD158b, FOXA2, FGF5, SOX17, XIST, NODAL, COL3A1, OTX2, DUSP6, EOMES, NR2F2, NROB1, CXCR4, CYP2B6, GAT A3, GATA4, ERBB4, GATA6, HOXC6, INHA, SMAD6, RORA, NIPBL, TNFSF11, CDH11, ZIC4, GAL, SOX3, PITX2, APOA2, CXCL5, CER1, FOXQ1, MLL5, DPP10, GSC, PCDH10, CTCFL, PCDH20, TSHZ1, MEGF10, MYC, DKK1, BMP2, LEFTY2, HES1, CDX2, GNAS, EGR1, COL3A1, TCF4, HEPH, KDR, TOX, FOXA1, LCK, PCDH7, CDID FOXG1, LEFTY1, TUJI, T gene (Brachyury), ZIC1, GATA1, GATA2, HDAC4, HDAC5, HDAC7, HDAC9, NOTCHI, NOTCH2, NOTCH4, PAX5, RBPJ, RUNX1, STAT1 and STAT3.

[0285] The terms “differentiation marker gene profile,” or “differentiation gene profile,” “differentiation gene expression profile,” “differentiation gene expression signature,” “differentiation gene expression panel,” “differentiation gene panel,” or “differentiation gene signature” as used herein refer to expression or levels of expression of a plurality of differentiation marker genes.

[0286] The term “nuclease” as used herein refers to any protein that catalyzes the cleavage of phosphodiester bonds. In some embodiments the nuclease is a DNA nuclease. In some embodiments the nuclease is a “nickase” which causes a single-strand break when it cleaves double-stranded DNA, e.g., genomic DNA in a cell. In some embodiments the nuclease causes a double-strand break when it cleaves double-stranded DNA, e.g., genomic DNA in a cell. In some embodiments the nuclease binds a specific target site within the double-stranded DNA that overlaps with or is adjacent to the location of the resulting break. In some embodiments, the nuclease causes a double-strand break that contains overhangs ranging from 0 (blunt ends) to 22 nucleotides in both 3′ and 5′ orientations. As discussed herein, CRISPR/Cas nucleases, zinc finger nucleases (ZFNs), transcription activator-like effector nucleases (TALENs) and meganucleases are exemplary nucleases that can be used in accordance with the strategies, systems, and methods of the present disclosure.

[0287] The term “edited iNK cell” as used herein refers to an iNK cell which has been modified to change at least one expression product of at least one gene at some point in the development of the cell. In some embodiments, a modification can be introduced using, e.g., gene editing techniques such as CRISPR-Cas or, e.g., dominant-negative constructs. In some embodiments, an iNK cell is edited at a time point before it has differentiated into an iNK cell, e.g., at a precursor stage, at a stem cell stage, etc. In some embodiments, an edited iNK cell is compared to a non-edited iNK cell (an NK cell produced by differentiating an iPSC cell, which iPSC cell and/or iNK cell do not have modifications, e.g., genetic modifications).

[0288] The term “embryonic stem cell” as used herein refers to pluripotent stem cells derived from the inner cell mass of the embryonic blastocyst. In some embodiments, embryonic stem cells are pluripotent and give rise during development to all derivatives of the three primary germ layers: ectoderm, endoderm and mesoderm. In some such embodiments, embryonic stem cells do not contribute to the extra-embryonic membranes or the placenta, i.e., are not totipotent.

[0289] The term “endogenous,” as used herein in the context of nucleic acids refers to a native nucleic acid (e.g., a gene, a protein coding sequence) in its natural location, e.g., within the genome of a cell.

[0290] The term “essential gene” as used herein with respect to a cell refers to a gene that encodes at least one gene product that is required for survival and/or proliferation of the cell. An essential gene can be a housekeeping gene that is essential for survival of all cell types or a gene that is required to be expressed in a specific cell type for survival and/or proliferation under particular culture conditions, e.g., for proper differentiation of iPS or ES cells or expansion of iPS- or ES-derived cells. Loss of function of an essential gene results, in some embodiments, in a significant reduction of cell survival, e.g., of the time a cell characterized by a loss of function of an essential gene survives as compared to a cell of the same cell type but without a loss of function of the same essential gene. In some embodiments, loss of function of an essential gene results in the death of the affected cell. In some embodiments, loss of function of an essential gene results in a significant reduction of cell proliferation, e.g., in the ability of a cell to divide, which can manifest in a significant time period the cell requires to complete a cell cycle, or, in some preferred embodiments, in a loss of a cell's ability to complete a cell cycle, and thus to proliferate at all.

[0291] The term “exogenous,” as used herein in the context of nucleic acids refers to a nucleic acid (whether native or non-native) that has been artificially introduced into a man-made construct (e.g., a knock-in cassette, or a donor template) or into the genome of a cell using, for example, gene editing or genetic engineering techniques, e.g., HDR based integration techniques.

[0292] The term “genome editing system” refers to any system having RNA-guided DNA editing activity.

[0293] The term “guide molecule” or “guide RNA” or “gRNA” when used in reference to a CRISPR/Cas system is any nucleic acid that promotes the specific association (or “targeting”) of a CRISPR/Cas nuclease, e.g., a Cas9 or a Cas12 protein to a DNA target site such as within a genomic sequence in a cell. While guide molecules are typically RNA molecules it is well known in the art that chemically modified RNA molecules including DNA/RNA hybrid molecules can be used as guide molecules.

[0294] The terms “hematopoietic stem cell,” or “definitive hematopoietic stem cell” as used herein, refer to CD34-positive (CD34+) stem cells. In some embodiments, CD34-positive stem cells are capable of giving rise to mature myeloid and/or lymphoid cell types. In some embodiments, the myeloid and/or lymphoid cell types include, for example, T cells, natural killer (NK) cells and/or B cells.

[0295] The terms “induced pluripotent stem cell”, “iPS cell” or “iPSC” as used herein to refer to a stem cell obtained from a differentiated somatic (e.g., adult, neonatal, or fetal) cell by a process referred to as reprogramming (e.g., dedifferentiation). In some embodiments, reprogrammed cells are capable of differentiating into tissues of all three germ or dermal layers: mesoderm, endoderm, and ectoderm. iPSCs are not found in nature.

[0296] The terms “iPS-derived NK cell” or “INK cell” or as used herein refers to a natural killer cell which has been produced by differentiating an iPS cell, which iPS cell may or may not have a genetic modification.

[0297] The terms “iPS-derived T cell” or “iT cell” or as used herein refers to a T which has been produced by differentiating an iPS cell, which iPS cell may or may not have a genetic modification.

[0298] The term “multipotent stem cell” as used herein refers to a cell that has the developmental potential to differentiate into cells of one or more germ layers (ectoderm, mesoderm and endoderm), but not all three germ layers. Thus, in some embodiments, a multipotent cell may also be termed a “partially differentiated cell.” Multipotent cells are well-known in the art, and examples of multipotent cells include adult stem cells, such as for example, hematopoietic stem cells and neural stem cells. In some embodiments, “multipotent” indicates that a cell may form many types of cells in a given lineage, but not cells of other lineages. For example, a multipotent hematopoietic cell can form the many different types of blood cells (red, white, platelets, etc.), but it cannot form neurons. Accordingly, in some embodiments, “multipotency” refers to a state of a cell with a degree of developmental potential that is less than totipotent and pluripotent.

[0299] The term “pluripotent” as used herein refers to ability of a cell to form all lineages of the body or soma (i.e., the embryo proper) or a given organism (e.g., human). For example, embryonic stem cells are a type of pluripotent stem cells that are able to form cells from each of the three germ layers, the ectoderm, the mesoderm, and the endoderm. Generally, pluripotency may be described as a continuum of developmental potencies ranging from an incompletely or partially pluripotent cell (e.g., an epiblast stem cell or EpiSC), which is unable to give rise to a complete organism to the more primitive, more pluripotent cell, which is able to give rise to a complete organism (e.g., an embryonic stem cell or an induced pluripotent stem cell).

[0300] The term “pluripotency” as used herein refers to a cell that has the developmental potential to differentiate into cells of all three germ layers (ectoderm, mesoderm, and endoderm). In some embodiments, pluripotency can be determined, in part, by assessing pluripotency characteristics of the cells. In some embodiments, pluripotency characteristics include, but are not limited to: (i) pluripotent stem cell morphology; (ii) the potential for unlimited self-renewal; (iii) expression of pluripotent stem cell markers including, but not limited to SSEA1 (mouse only), SSEA3/4, SSEA5, TRA1-60/81, TRA1-85, TRA2-54, GCTM-2, TG343, TG30, CD9, CD29, CD133/prominin, CD140a, CD56, CD73, CD90, CD105, OCT4 (also known as POU5F1), NANOG, SOX2, CD30 and/or CD50; (iv) ability to differentiate to all three somatic lineages (ectoderm, mesoderm and endoderm); (v) teratoma formation consisting of the three somatic lineages; and (vi) formation of embryoid bodies consisting of cells from the three somatic lineages.

[0301] The term “pluripotent stem cell morphology” as used herein refers to the classical morphological features of an embryonic stem cell. In some embodiments, normal embryonic stem cell morphology is characterized as small and round in shape, with a high nucleus-to-cytoplasm ratio, the notable presence of nucleoli, and typical intercell spacing.

[0302] The term “polycistronic” or “multicistronic” when used herein with reference to a knock-in cassette refers to the fact that the knock-in cassette can express two or more proteins from the same mRNA transcript. Similarly, a “bicistronic” knock-in cassette is a knock-in cassette that can express two proteins from the same mRNA transcript.

[0303] The term “polynucleotide” (including, but not limited to “nucleotide sequence”, “nucleic acid”, “nucleic acid molecule”, “nucleic acid sequence”, and “oligonucleotide”) as used herein refers to a series of nucleotide bases (also called “nucleotides”) and means any chain of two or more nucleotides. In some embodiments, polynucleotides, nucleotide sequences, nucleic acids, etc. can be chimeric mixtures or derivatives or modified versions thereof, single-stranded or double-stranded. In some such embodiments, modifications can occur at the base moiety, sugar moiety, or phosphate backbone, for example, to improve stability of the molecule, its hybridization parameters, etc. In general, a nucleotide sequence typically carries genetic information, including, but not limited to, the information used by cellular machinery to make proteins and enzymes. In some embodiments, a nucleotide sequence and/or genetic information comprises double- or single-stranded genomic DNA, RNA, any synthetic and genetically manipulated polynucleotide, and/or sense and/or antisense polynucleotides. In some embodiments, nucleic acids contain modified bases.

[0304] Conventional IUPAC notation is used in nucleotide sequences presented herein, as shown in Table 1, below (see also Cornish-Bowden, Nucleic Acids Res. 1985; 13(9):3021-30, incorporated by reference herein). It should be noted, however, that “T” denotes “Thymine or Uracil” in those instances where a sequence may be encoded by either DNA or RNA, for example in certain CRISPR/Cas guide molecule targeting domains.

TABLE 1
IUPAC nucleic acid notation

| Character | Base |
|---|---|
| A | Adenine |
| T | Thymine or Uracil |
| G | Guanine |
| C | Cytosine |
| U | Uracil |
| K | G or T/U |
| M | A or C |
| R | A or G |
| Y | C or T/U |
| S | C or G |
| W | A or T/U |
| B | C, G or T/U |
| V | A, C or G |
| H | A, C or T/U |
| D | A, G or T/U |
| N | A, C, G or T/U |

[0305] The terms “potency” or “developmental potency” as used herein refer to the sum of all developmental options accessible to the cell (i.e., the developmental potency), particularly, for example in the context of cellular developmental potential. In some embodiments, the continuum of cell potency includes, but is not limited to, totipotent cells, pluripotent cells, multipotent cells, oligopotent cells, unipotent cells, and terminally differentiated cells.

[0306] The terms “prevent,” “preventing,” and “prevention” as used herein with reference to a disease refer to the prevention of the disease in a mammal, e.g., in a human, including (a) avoiding or precluding the disease; (b) affecting the predisposition toward the disease; or (c) preventing or delaying the onset of at least one symptom of the disease.

[0307] The terms “protein,” “peptide” and “polypeptide” as used herein are used interchangeably to refer to a sequential chain of amino acids linked together via peptide bonds. The terms include individual proteins, groups or complexes of proteins that associate together, as well as fragments or portions, variants, derivatives and analogs of such proteins. Unless otherwise specified, peptide sequences are presented herein using conventional notation, beginning with the amino or N-terminus on the left, and proceeding to the carboxyl or C-terminus on the right. Standard one-letter or three-letter abbreviations can be used.

[0308] The term “gene product of interest” as used herein can refer to any product encoded by a gene including any polynucleotide or polypeptide. In some embodiments the gene product is a protein which is not naturally expressed by a target cell of the present disclosure. In some embodiments the gene product is a protein which confers a new therapeutic activity to the cell such as, but not limited to, a chimeric antigen receptor (CAR) or antigen-binding fragment thereof, a T cell receptor or antigen-binding portion thereof, a non-naturally occurring variant of FcγRIII (CD16), interleukin 15 (IL-15), interleukin 15 receptor (IL-15R) or a variant thereof, interleukin 12 (IL-12), interleukin-12 receptor (IL-12R) or a variant thereof, human leukocyte antigen G (HLA-G), human leukocyte antigen E (HLA-E), leukocyte surface antigen cluster of differentiation CD47 (CD47), or any combination of two or more thereof. It is to be understood that the methods and cells of the present disclosure are not limited to any particular gene product of interest and that the selection of a gene product of interest will depend on the type of cell and ultimate use of the cells.

[0309] The term “reporter gene” as used herein refers to an exogenous gene that has been introduced into a cell, e.g., integrated into the genome of the cell, that confers a trait suitable for artificial selection. Common reporter genes are fluorescent reporter genes that encode a fluorescent protein, e.g., green fluorescent protein (GFP) and antibiotic resistance genes that confer antibiotic resistance to cells.

[0310] The terms “reprogramming” or “dedifferentiation” or “increasing cell potency” or “increasing developmental potency” as used herein refer to a method of increasing potency of a cell or dedifferentiating a cell to a less differentiated state. For example, in some embodiments, a cell that has an increased cell potency has more developmental plasticity (i.e., can differentiate into more cell types) compared to the same cell in the non-reprogrammed state. That is, in some embodiments, a reprogrammed cell is one that is in a less differentiated state than the same cell in a non-reprogrammed state. In some embodiments, “reprogramming” refers to de-differentiating a somatic cell, or a multipotent stem cell, into a pluripotent stem cell, also referred to as an induced pluripotent stem cell, or iPSC. Suitable methods for the generation of iPSCs from somatic or multipotent stem cells are well known to those of skill in the art.

[0311] The terms “RNA-guided nuclease” and “RNA-guided nuclease molecule” are used interchangeably herein. In some embodiments, the RNA-guided nuclease is a RNA-guided DNA endonuclease enzyme. In some embodiments, the RNA-guided nuclease is a CRISPR nuclease. Non-limiting examples of RNA-guided nucleases are listed in Table 5 below, and the methods and compositions disclosed herein can use any combination of RNA-guided nucleases disclosed herein, or known to those of ordinary skill in the art. Those of ordinary skill in the art will be aware of additional nucleases and nuclease variants suitable for use in the context of the present disclosure, and it will be understood that the present disclosure is not limited in this respect.

[0312] Additional suitable RNA-guided nucleases, e.g., Cas9 and Cas12 nucleases, will be apparent to the skilled artisan in view of the present disclosure, and the disclosure is not limited by the exemplary suitable nucleases provided herein. In some embodiments, a suitable nuclease is a Cas12a, Cas9, Cas12b, Cas12c, Cas12e, CasX, or CasΦ (Cas12j), or a variant thereof (e.g., a variant with a high editing efficiency, e.g., capable of editing about 60% to 100% of cells in a population of cells) nuclease. In some embodiments, the disclosure also embraces nuclease variants, e.g., Cas9, Cpf1 (Cas12a, such as the Mad7 Cas12a variant), Cas12b, Cas12e, CasX, or CasΦ (Cas12j) nuclease variants. In some embodiments, a nuclease is a nuclease variant, which refers to a nuclease comprising an amino acid sequence characterized by one or more amino acid substitutions, deletions, or additions as compared to the wild type amino acid sequence of the nuclease. In some embodiments, a suitable nuclease and/or nuclease variant may also include purification tags (e.g., polyhistidine tags) and/or signaling peptides, e.g., comprising or consisting of a nuclear localization signal sequence. Some non-limiting examples of suitable nucleases and nuclease variants are described in more detail elsewhere herein and also include those described in PCT application PCT/US2019/22374, filed Mar. 14, 2019, and entitled “Systems and Methods for the Treatment of Hemoglobinopathies,” the entire contents of which are incorporated herein by reference. In some embodiments, the RNA-guided nuclease is an Acidaminococcus sp. Cpf1 variant (AsCpf1 variant). In some embodiments, suitable Cpf1 nuclease variants, including suitable AsCpf1 variants will be known or apparent to those of ordinary skill in the art based on the present disclosure, and include, but are not limited to, the Cpf1 variants disclosed herein or otherwise known in the art. For example, in some embodiments, the RNA-guided nuclease is a Acidaminococcus sp. Cpf1 RR variant (AsCpf1-RR). In another embodiment, the RNA-guided nuclease is a Cpf1 RVR variant. For example, suitable Cpf1 variants include those having an M537R substitution, an H800A substitution, and/or an F870L substitution, or any combination thereof (numbering scheme according to AsCpf1 wild-type sequence).

[0313] The term “subject” as used herein means a human or non-human animal. In some embodiments a human subject can be any age (e.g., a fetus, infant, child, young adult, or adult). In some embodiments a human subject may be at risk of or suffer from a disease, or may be in need of alteration of a gene or a combination of specific genes. Alternatively, in some embodiments, a subject may be a non-human animal, which may include, but is not limited to, a mammal. In some embodiments, a non-human animal is a non-human primate, a rodent (e.g., a mouse, rat, hamster, guinea pig, etc.), a rabbit, a dog, a cat, and so on. In certain embodiments of this disclosure, the non-human animal subject is livestock, e.g., a cow, a horse, a sheep, a goat, etc. In certain embodiments, the non-human animal subject is poultry, e.g., a chicken, a turkey, a duck, etc.

[0314] The terms “treatment,” “treat,” and “treating,” as used herein refer to a clinical intervention aimed to reverse, alleviate, delay the onset of, or inhibit the progress, ameliorate, reduce severity of, prevent or delay the recurrence of a disease, disorder, or condition or one or more symptoms thereof, and/or improve one or more symptoms of a disease, disorder, or condition as described herein. In some embodiments, a condition includes an injury. In some embodiments, an injury may be acute or chronic (e.g., tissue damage from an underlying disease or disorder that causes, e.g., secondary damage such as tissue injury). In some embodiments, treatment, e.g., in the form of an iPSC-derived NK cell or a population of iPSC-derived NK cells as described herein, may be administered to a subject after one or more symptoms have developed and/or after a disease has been diagnosed. Treatment may be administered in the absence of symptoms, e.g., to prevent or delay onset of a symptom or inhibit onset or progression of a disease. For example, in some embodiments, treatment may be administered to a susceptible subject prior to the onset of symptoms (e.g., in light of genetic or other susceptibility factors). In some embodiments, treatment may also be continued after symptoms have resolved, for example to prevent or delay their recurrence. In some embodiments, treatment results in improvement and/or resolution of one or more symptoms of a disease, disorder or condition.

[0315] The term “variant” as used herein refers to an entity such as a polypeptide or polynucleotide that shows significant structural identity with a reference entity but differs structurally from the reference entity in the presence or level of one or more chemical moieties as compared with the reference entity. In many embodiments, a variant also differs functionally from its reference entity. In general, whether a particular entity is properly considered to be a “variant” of a reference entity is based on its degree of structural identity with the reference entity. As used herein, the terms “functional variant” refer to a variant that confers the same function as the reference entity, e.g., a functional variant of a gene product of an essential gene is a variant that promotes the survival and/or proliferation of a cell. It is to be understood that a functional variant need not be functionally equivalent to the reference entity as long as it confers the same function as the reference entity.

### Target Cells

[0316] Methods of the disclosure can be used to edit the genome of any cell. In certain embodiments, the target cell is a stem cell, e.g., an iPS or ES cell. In certain embodiments, the target cell can be an iPS- or ES-derived cell, where the genetic modification is made at any stage during the reprogramming process from donor cell to iPSC, during the iPSC stage, and/or at any stage of the process of differentiating the iPSC or ESC to a specialized cell, or even up to or at the final specialized cell state. In certain embodiments, the target cell can be an iPS-derived NK cell (iNK cell) or iPS-derived T cell (iT cell) where the genetic modification is made at any stage during the reprogramming process from donor cell to iPSC, during the iPSC stage, and/or at any stage of the process of differentiating the iPSC to an iNK or iT state, e.g., at an intermediary state, such as, for example, an iPSC-derived HSC state, or even up to or at the final iNK or iT cell state.

[0317] In certain embodiments, a target cell is one or more of a long-term hematopoietic stem cell, a short term hematopoietic stem cell, a multipotent progenitor cell, a lineage restricted progenitor cell, a lymphoid progenitor cell, a myeloid progenitor cell, a common myeloid progenitor cell, an erythroid progenitor cell, a megakaryocyte erythroid progenitor cell, a retinal cell, a photoreceptor cell, a rod cell, a cone cell, a retinal pigmented epithelium cell, a trabecular meshwork cell, a cochlear hair cell, an outer hair cell, an inner hair cell, a pulmonary epithelial cell, a bronchial epithelial cell, an alveolar epithelial cell, a pulmonary epithelial progenitor cell, a striated muscle cell, a cardiac muscle cell, a muscle satellite cell, a neuron, a neuronal stem cell, a mesenchymal stem cell, an induced pluripotent stem (iPS) cell, an embryonic stem cell, a fibroblast, a monocyte-derived macrophage or dendritic cell, a megakaryocyte, a neutrophil, an eosinophil, a basophil, a mast cell, a reticulocyte, a B cell, e.g., a progenitor B cell, a Pre B cell, a Pro B cell, a memory B cell, a plasma B cell, a gastrointestinal epithelial cell, a biliary epithelial cell, a pancreatic ductal epithelial cell, an intestinal stem cell, a hepatocyte, a liver stellate cell, a Kupffer cell, an osteoblast, an osteoclast, an adipocyte, a preadipocyte, a pancreatic islet cell (e.g., a beta cell, an alpha cell, a delta cell), a pancreatic exocrine cell, a Schwann cell, or an oligodendrocyte. In some embodiments, a target cell is a neuronal progenitor cell. In some embodiments, a target cell is a neuron.

[0318] In some embodiments, a target cell is a circulating blood cell, e.g., a reticulocyte, megakaryocyte erythroid progenitor (MEP) cell, myeloid progenitor cell (CMP/GMP), lymphoid progenitor (LP) cell, hematopoietic stem/progenitor cell (HSC), or endothelial cell (EC). In some embodiments, a target cell is one or more of a bone marrow cell (e.g., a reticulocyte, an erythroid cell (e.g., erythroblast), an MEP cell, myeloid progenitor cell (CMP/GMP), LP cell, erythroid progenitor (EP) cell, HSC, multipotent progenitor (MPP) cell, endothelial cell (EC), hemogenic endothelial (HE) cell, or mesenchymal stem cell). In some embodiments, a target cell is one or more of a myeloid progenitor cell (e.g., a common myeloid progenitor (CMP) cell or granulocyte macrophage progenitor (GMP) cell). In some embodiments, a target cell is a lymphoid progenitor cell, e.g., a common lymphoid progenitor (CLP) cell. In some embodiments, a target cell is one or more of an erythroid progenitor cell (e.g., an MEP cell). In some embodiments, a target cell is one or more of a hematopoietic stem/progenitor cell (e.g., a long term HSC (LT-HSC), short term HSC (ST-HSC), MPP cell, or lineage restricted progenitor (LRP) cell). In certain embodiments, the target cell is a CD34⁺ cell, CD34⁺CD90⁺ cell, CD34⁺CD38⁻ cell, CD34⁺CD90⁺CD49f⁺CD38⁺CD45RA⁻ cell, CD105⁺ cell, CD31⁺, or CD133⁺ cell, or a CD34⁺CD90⁺ CD133⁺ cell. In some embodiments, a target cell is one or more of an umbilical cord blood CD34⁺ HSPC, umbilical cord venous endothelial cell, umbilical cord arterial endothelial cell, amniotic fluid CD34⁺ cell, amniotic fluid endothelial cell, placental endothelial cell, or placental hematopoietic CD34⁺ cell. In some embodiments, a target cell is one or more of a mobilized peripheral blood hematopoietic CD34⁺ cell (after the subject is treated with a mobilization agent, e.g., G-CSF or Plerixafor). In some embodiments, a target cell is a peripheral blood endothelial cell. In some embodiments, a target cell is a peripheral blood natural killer cell.

[0319] In certain embodiments, a target cell is a primary cell, e.g., a cell isolated from a human subject. In certain embodiments, a target cell is an immune cell, e.g., a primary immune cell isolated from a human subject. In certain embodiments, a target cell is part of a population of cells isolated from a subject, e.g., a human subject. In some embodiments, the population of cells comprises a population of immune cells isolated from a subject. In some embodiments, the population of cells comprises tumor infiltrating lymphocytes (TILs), e.g., TILs isolated from a human subject. In some embodiments, a target cell is isolated from a healthy subject, e.g., a healthy human donor. In some embodiments, a target cell is isolated from a subject having a disease or illness, e.g., a human patient in need of a treatment.

[0320] In certain embodiments, a target cell is an immune cell, e.g., a primary immune cell, e.g., a CD8⁺ T cell, a CD8⁺ naïve T cell, a CD4⁺ central memory T cell, a CD8⁺ central memory T cell, a CD4⁺ effector memory T cell, a CD4⁺ effector memory T cell, a CD4⁺ T cell, a CD4⁺ stem cell memory T cell, a CD8⁺ stem cell memory T cell, a CD4⁺ helper T cell, a regulatory T cell, a cytotoxic T cell, a natural killer T cell, a CD4+ naïve T cell, a TH17 CD4⁺ T cell, a TH1 CD4⁺ T cell, a TH2 CD4⁺ T cell, a TH9 CD4⁺ T cell, a CD4⁺ Foxp3⁺ T cell, a CD4⁺ CD25⁺ CD127⁻ T cell, or a CD4⁺ CD25⁺ CD127⁻Foxp3⁺ T cell. In some embodiments, a target cell is an alpha-beta T cell, a gamma-delta T cell or a Treg. In some embodiments a target cell is macrophage. In some embodiments, a target cell is an innate lymphoid cell. In some embodiments, a target cell is a dendritic cell. In some embodiments, a target cell is a beta cell, e.g., a pancreatic beta cell.

[0321] In some embodiments, a target cell is isolated from a subject having a cancer.

[0322] In some embodiments, a target cell is isolated from a subject having a cancer, including but not limited to, acoustic neuroma; adenocarcinoma; adrenal gland cancer; anal cancer; angiosarcoma (e.g., lymphangiosarcoma, lymphangioendotheliosarcoma, hemangiosarcoma); appendix cancer; benign monoclonal gammopathy; biliary cancer (e.g., cholangiocarcinoma); bile duct cancer; bladder cancer; bone cancer; breast cancer (e.g., adenocarcinoma of the breast, papillary carcinoma of the breast, mammary cancer, medullary carcinoma of the breast); brain cancer (e.g., meningioma, glioblastomas, glioma (e.g., astrocytoma, oligodendroglioma, medulloblastoma); bronchus cancer; carcinoid tumor; cardiac tumor; cervical cancer (e.g., cervical adenocarcinoma); choriocarcinoma; chordoma; craniopharyngioma; colorectal cancer (e.g., colon cancer, rectal cancer, colorectal adenocarcinoma); connective tissue cancer; epithelial carcinoma; ductal carcinoma in situ; ependymoma; endotheliosarcoma (e.g., Kaposi's sarcoma, multiple idiopathic hemorrhagic sarcoma); endometrial cancer (e.g., uterine cancer, uterine sarcoma); esophageal cancer (e.g., adenocarcinoma of the esophagus, Barrett's adenocarcinoma); Ewing's sarcoma; eye cancer (e.g., intraocular melanoma, retinoblastoma); familiar hypereosinophilia; gall bladder cancer; gastric cancer (e.g., stomach adenocarcinoma); gastrointestinal stromal tumor (GIST); germ cell cancer; head and neck cancer (e.g., head and neck squamous cell carcinoma, oral cancer (e.g., oral squamous cell carcinoma), throat cancer (e.g., laryngeal cancer, pharyngeal cancer, nasopharyngeal cancer, oropharyngeal cancer); hematopoietic cancer (e.g., lymphomas, primary pulmonary lymphomas, bronchus-associated lymphoid tissue lymphomas, splenic lymphomas, nodal marginal zone lymphomas, pediatric B cell non-Hodgkin lymphomas); hemangioblastoma; histiocytosis; hypopharynx cancer; inflammatory myofibroblastic tumors; immunocytic amyloidosis; kidney cancer (e.g., nephroblastoma a.k.a. Wilms' tumor, renal cell carcinoma); liver cancer (e.g., hepatocellular cancer (HCC), malignant hepatoma); lung cancer (e.g., bronchogenic carcinoma, small cell lung cancer (SCLC), non-small cell lung cancer (NSCLC), adenocarcinoma of the lung); leiomyosarcoma (LMS); melanoma; midline tract carcinoma; multiple endocrine neoplasia syndrome; muscle cancer; mesothelioma; nasopharynx cancer; neuroblastoma; neurofibroma (e.g., neurofibromatosis (NF) type 1 or type 2, schwannomatosis); neuroendocrine cancer (e.g., gastroenteropancreatic neuroendocrine tumor (GEP-NET), carcinoid tumor); osteosarcoma (e.g., bone cancer); ovarian cancer (e.g., cystadenocarcinoma, ovarian embryonal carcinoma, ovarian adenocarcinoma); papillary adenocarcinoma; pancreatic cancer (e.g., pancreatic adenocarcinoma, intraductal papillary mucinous neoplasm (IPMN), Islet cell tumors); parathyroid cancer; papillary adenocarcinoma; penile cancer (e.g., Paget's disease of the penis and scrotum); pharyngeal cancer; pinealoma; pituitary cancer; pleuropulmonary blastoma; primitive neuroectodermal tumor (PNT); plasma cell neoplasia; paraneoplastic syndromes; intraepithelial neoplasms; prostate cancer (e.g., prostate adenocarcinoma); rectal cancer; rhabdomyosarcoma; retinoblastoma; salivary gland cancer; skin cancer (e.g., squamous cell carcinoma (SCC), keratoacanthoma (KA), melanoma, basal cell carcinoma (BCC)); small bowel cancer (e.g., appendix cancer); soft tissue sarcoma (e.g., malignant fibrous histiocytoma (MFH), liposarcoma, malignant peripheral nerve sheath tumor (MPNST), chondrosarcoma, fibrosarcoma, myxosarcoma); sebaceous gland carcinoma; stomach cancer; small intestine cancer; sweat gland carcinoma; synovioma; testicular cancer (e.g., seminoma, testicular embryonal carcinoma); thymic cancer; thyroid cancer (e.g., papillary carcinoma of the thyroid, papillary thyroid carcinoma (PTC), medullary thyroid cancer); urethral cancer; uterine cancer; vaginal cancer; vulvar cancer (e.g., Paget's disease of the vulva), or any combination thereof.

[0323] In some embodiments, a target cell is isolated from a subject having a hematological disorder. In some embodiments, a target cell is isolated form a subject having sickle cell anemia. In some embodiments, a target cell is isolated from a subject having β-thalassemia.

### Stem Cells

[0324] Methods of the disclosure can be used with stem cells. Stem cells are typically cells that have the capacity to produce unaltered daughter cells (self-renewal; cell division produces at least one daughter cell that is identical to the parent cell) and to give rise to specialized cell types (potency). Stem cells include, but are not limited to, embryonic stem (ES) cells, embryonic germ (EG) cells, germline stem (GS) cells, human mesenchymal stem cells (hMSCs), adipose tissue-derived stem cells (ADSCs), multipotent adult progenitor cells (MAPCs), multipotent adult germline stem cells (maGSCs) and unrestricted somatic stem cell (USSCs). Generally, stem cells can divide without limit. After division, the stem cell may remain as a stem cell, become a precursor cell, or proceed to terminal differentiation. A precursor cell is a cell that can generate a fully differentiated functional cell of at least one given cell type. Generally, precursor cells can divide. After division, a precursor cell can remain a precursor cell, or may proceed to terminal differentiation.

[0325] Pluripotent stem cells are generally known in the art. The present disclosure provides technologies (e.g., systems, compositions, methods, etc.) related to pluripotent stem cells. In some embodiments, pluripotent stem cells are stem cells that: (a) are capable of inducing teratomas when transplanted in immunodeficient (SCID) mice; (b) are capable of differentiating to cell types of all three germ layers (e.g., can differentiate to ectodermal, mesodermal, and endodermal cell types); and/or (c) express one or more markers of embryonic stem cells (e.g., human embryonic stem cells express Oct-4, alkaline phosphatase, SSEA-3 surface antigen, SSEA-4 surface antigen, nanog, TRA-1-60, TRA-1-81, Sox-2, REX1, etc.). In some aspects, human pluripotent stem cells do not show expression of differentiation markers. In some embodiments, ES cells and/or iPSCs edited using methods of the disclosure maintain their pluripotency, e.g., (a) are capable of inducing teratomas when transplanted in immunodeficient (SCID) mice; (b) are capable of differentiating to cell types of all three germ layers, e.g., can differentiate to ectodermal, mesodermal, and endodermal cell types); and/or (c) express one or more markers of embryonic stem cells.

[0326] In some embodiments, ES cells (e.g., human ES cells) can be derived from the inner cell mass of blastocysts or morulae. In some embodiments, ES cells can be isolated from one or more blastomeres of an embryo, e.g., without destroying the remainder of the embryo. In some embodiments, ES cells can be produced by somatic cell nuclear transfer. In some embodiments, ES cells can be derived from fertilization of an egg cell with sperm or DNA, nuclear transfer, parthenogenesis, or by means to generate ES cells, e.g., with homozygosity in the HLA region. In some embodiments, human ES cells can be produced or derived from a zygote, blastomeres, or blastocyst-staged mammalian embryo produced by the fusion of a sperm and egg cell, nuclear transfer, parthenogenesis, or the reprogramming of chromatin and subsequent incorporation of the reprogrammed chromatin into a plasma membrane to produce an embryonic cell. Exemplary human ES cells are known in the art and include, but are not limited to, MAO1, MAO9, ACT-4, No. 3, H1, H7, H9, H14 and ACT30 ES cells. In some embodiments, human ES cells, regardless of their source or the particular method used to produce them, can be identified based on, e.g., (i) the ability to differentiate into cells of all three germ layers, (ii) expression of at least Oct-4 and alkaline phosphatase, and/or (iii) ability to produce teratomas when transplanted into immunocompromised animals. In some embodiments, ES cells have been serially passaged as cell lines.

### iPS Cells

[0327] Induced pluripotent stem cells (iPSC) are a type of pluripotent stem cell artificially derived from a non-pluripotent cell, such as an adult somatic cell (e.g., a fibroblast cell or other suitable somatic cell), by inducing expression of certain genes. iPSCs can be derived from any organism, such as a mammal. In some embodiments, iPSCs are produced from mice, rats, rabbits, guinea pigs, goats, pigs, cows, non-human primates or humans. iPSCs are similar to ES cells in many respects, such as the expression of certain stem cell genes and proteins, chromatin methylation patterns, doubling time, embryoid body formation, teratoma formation, viable chimera formation, potency and/or differentiability. Various suitable methods for producing iPSCs are known in the art. In some embodiments, iPSCs can be derived by transfection of certain stem cell-associated genes (such as Oct-3/4 (Pouf51) and Sox-2) into non-pluripotent cells, such as adult fibroblasts. Transfection can be achieved through viral vectors, such as retroviruses, lentiviruses, or adenoviruses. Additional suitable reprogramming methods include the use of vectors that do not integrate into the genome of the host cell, e.g., episomal vectors, or the delivery of reprogramming factors directly via encoding RNA or as proteins has also been described. For example, cells can be transfected with Oct-3/4, Sox-2, Klf4, and/or c-Myc using a retroviral system or with Oct-4, Sox-2, NANOG, and/or LIN28 using a lentiviral system. After 3-4 weeks, small numbers of transfected cells begin to become morphologically and biochemically similar to pluripotent stem cells, and can be isolated through morphological selection, doubling time, or through a reporter gene and antibiotic selection. In one example, iPSCs from adult human cells are generated by the method described by Yu et al., Science 2007; 318(5854): 1224 or Takahashi et al., Cell 2007; 131:861-72. Numerous suitable methods for reprogramming are known to those of skill in the art, and the present disclosure is not limited in this respect.

[0328] In some embodiments, a target cell for the editing and cargo integration methods described herein is an iPSC, wherein the edited iPSC is then differentiated, e.g., into an iPSC-derived immune cell. In some embodiments, the differentiated cell is an iPSC-derived immune cell. In some embodiments, the differentiated cell is an iPSC-derived iNK cell, an iPSC-derived T cell (e.g., an iPSC-derived alpha-beta T cell, gamma-delta T cell, Treg, CD4+ T cell, or CD8+ T cell), an iPSC-derived dendritic cell, or an iPSC-derived macrophage. In some embodiments, the differentiated cell is an iPSC-derived pancreatic beta cell.

### iNK Cells

[0329] In some embodiments, the present disclosure provides methods of generating iNK cells (e.g., genetically modified iNK cells), e.g., derived from a genetically modified stem cell (e.g., iPSC).

[0330] In some embodiments, genetic modifications present in an iNK cell of the present disclosure can be made at any stage during the reprogramming process from donor cell to iPSC, during the iPSC stage, and/or at any stage of the process of differentiating the iPSC to an iNK state, e.g., at an intermediary state, such as, for example, an iPSC-derived HSC state, or even up to or at the final iNK cell state.

[0331] For example, one or more genomic modifications present in a genetically modified iNK cell of the present disclosure may be made at one or more different cell stages (e.g., reprogramming from donor to iPSC, differentiation of iPSC to iNK). In some embodiments, one or more genomic modifications present in a genetically modified iNK cell provided herein is made before reprogramming a donor cell to an iPSC state. In some embodiments, all edits present in a genetically modified iNK cell provided herein are made at the same time, in close temporal proximity, and/or at the same cell stage of the reprogramming/differentiation process, e.g., at the donor cell stage, during the reprogramming process, at the iPSC stage, or during the differentiation process, e.g., from iPSC to iNK. In some embodiments, two or more edits present in a genetically modified iNK cell provided herein are made at different times and/or at different cell stages of the reprogramming/differentiation process from donor cell to iPSC to iNK. For example, in some embodiments, a first edit is made at the donor cell stage and a second (different) edit is made at the iPSC stage. In some embodiments, a first edit is made at the reprogramming stage (e.g., donor to iPSC) and a second (different) edit is made at the iPSC stage.

[0332] A variety of cell types can be used as a donor cell that can be subjected to reprogramming, differentiation, and/or genetic engineering strategies described herein. For example, the donor cell can be a pluripotent stem cell or a differentiated cell, e.g., a somatic cell, such as, for example, a fibroblast or a T lymphocyte. In some embodiments, donor cells are manipulated (e.g., subjected to reprogramming, differentiation, and/or genetic engineering) to generate iNK cells described herein.

[0333] A donor cell can be from any suitable organism. For example, in some embodiments, the donor cell is a mammalian cell, e.g., a human cell or a non-human primate cell. In some embodiments, the donor cell is a somatic cell. In some embodiments, the donor cell is a stem cell or progenitor cell. In certain embodiments, the donor cell is not or was not part of a human embryo and its derivation does not involve destruction of a human embryo.

[0334] In some embodiments, a genetically modified iNK cell is derived from an iPSC, which in turn is derived from a somatic donor cell. Any suitable somatic cell can be used in the generation of iPSCs, and in turn, the generation of iNK cells. Suitable strategies for deriving iPSCs from various somatic donor cell types have been described and are known in the art. In some embodiments, a somatic donor cell is a fibroblast cell. In some embodiments, a somatic donor cell is a mature T cell.

[0335] For example, in some embodiments, a somatic donor cell, from which an iPSC, and subsequently an iNK cell is derived, is a developmentally mature T cell (a T cell that has undergone thymic selection). One hallmark of developmentally mature T cells is a rearranged T cell receptor locus. During T cell maturation, the TCR locus undergoes V(D)J rearrangements to generate complete V-domain exons. These rearrangements are retained throughout reprogramming of a T cells to an iPSC, and throughout differentiation of the resulting iPSC to a somatic cell.

[0336] In certain embodiments, a somatic donor cell is a CD8⁺ T cell, a CD8⁺ naïve T cell, a CD4⁺ central memory T cell, a CD8⁺ central memory T cell, a CD4⁺ effector memory T cell, a CD4⁺ effector memory T cell, a CD4⁺ T cell, a CD4⁺ stem cell memory T cell, a CD8⁺ stem cell memory T cell, a CD4⁺helper T cell, a regulatory T cell, a cytotoxic T cell, a natural killer T cell, a CD4+ naïve T cell, a TH17 CD4⁺ T cell, a TH1 CD4⁺ T cell, a TH2 CD4⁺ T cell, a TH9 CD4⁺ T cell, a CD4⁺ Foxp3⁺ T cell, a CD4⁺ CD25⁺ CD127⁻ T cell, or a CD4⁺ CD25⁺ CD127⁻Foxp3⁺ T cell.

[0337] T cells can be advantageous for the generation of iPSCs. For example, T cells can be edited with relative ease, e.g., by CRISPR-based methods or other genetic engineering methods. Additionally, the rearranged TCR locus allows for genetic tracking of individual cells and their daughter cells. For example, if the reprogramming, expansion, culture, and/or differentiation strategies involved in the generation of NK cells a clonal expansion of a single cell, the rearranged TCR locus can be used as a genetic marker unambiguously identifying a cell and its daughter cells. This, in turn, allows for the characterization of a cell population as truly clonal, or for the identification of mixed populations, or contaminating cells in a clonal population. Another potential advantage of using T cells in generating iNK cells carrying multiple edits is that certain karyotypic aberrations associated with chromosomal translocations are selected against in T cell culture. Such aberrations can pose a concern when editing cells by CRISPR technology, and in particular when generating cells carrying multiple edits. Using T cell derived iPSCs as a starting point for the derivation of therapeutic lymphocytes can allow for the expression of a pre-screened TCR in the lymphocytes, e.g., via selecting the T cells for binding activity against a specific antigen, e.g., a tumor antigen, reprogramming the selected T cells to iPSCs, and then deriving lymphocytes from these iPSCs that express the TCR (e.g., T cells). This strategy can allow for activating the TCR in other cell types, e.g., by genetic or epigenetic strategies. Additionally, T cells retain at least part of their “epigenetic memory” throughout the reprogramming process, and thus subsequent differentiation of the same or a closely related cell type, such as iNK cells can be more efficient and/or result in higher quality cell populations as compared to approaches using non-related cells, such as fibroblasts, as a starting point for iNK derivation.

[0338] In some embodiments, a donor cell being manipulated, e.g., a cell being reprogrammed and/or undergoing genetic engineering as described herein, is one or more of a long-term hematopoietic stem cell, a short term hematopoietic stem cell, a multipotent progenitor cell, a lineage restricted progenitor cell, a lymphoid progenitor cell, a myeloid progenitor cell, a common myeloid progenitor cell, an erythroid progenitor cell, a megakaryocyte erythroid progenitor cell, a retinal cell, a photoreceptor cell, a rod cell, a cone cell, a retinal pigmented epithelium cell, a trabecular meshwork cell, a cochlear hair cell, an outer hair cell, an inner hair cell, a pulmonary epithelial cell, a bronchial epithelial cell, an alveolar epithelial cell, a pulmonary epithelial progenitor cell, a striated muscle cell, a cardiac muscle cell, a muscle satellite cell, a neuron, a neuronal stem cell, a mesenchymal stem cell, an induced pluripotent stem (iPS) cell, an embryonic stem cell, a fibroblast, a monocyte-derived macrophage or dendritic cell, a megakaryocyte, a neutrophil, an eosinophil, a basophil, a mast cell, a reticulocyte, a B cell, e.g., a progenitor B cell, a Pre B cell, a Pro B cell, a memory B cell, a plasma B cell, a gastrointestinal epithelial cell, a biliary epithelial cell, a pancreatic ductal epithelial cell, an intestinal stem cell, a hepatocyte, a liver stellate cell, a Kupffer cell, an osteoblast, an osteoclast, an adipocyte, a preadipocyte, a pancreatic islet cell (e.g., a beta cell, an alpha cell, a delta cell), a pancreatic exocrine cell, a Schwann cell, or an oligodendrocyte.

[0339] In some embodiments, a donor cell is one or more of a circulating blood cell, e.g., a reticulocyte, megakaryocyte erythroid progenitor (MEP) cell, myeloid progenitor cell (CMP/GMP), lymphoid progenitor (LP) cell, hematopoietic stem/progenitor cell (HSC), or endothelial cell (EC). In some embodiments, a donor cell is one or more of a bone marrow cell (e.g., a reticulocyte, an erythroid cell (e.g., erythroblast), an MEP cell, myeloid progenitor cell (CMP/GMP), LP cell, erythroid progenitor (EP) cell, HSC, multipotent progenitor (MPP) cell, endothelial cell (EC), hemogenic endothelial (HE) cell, or mesenchymal stem cell). In some embodiments, a donor cell is one or more of a myeloid progenitor cell (e.g., a common myeloid progenitor (CMP) cell or granulocyte macrophage progenitor (GMP) cell). In some embodiments, a donor cell is one or more of a lymphoid progenitor cell, e.g., a common lymphoid progenitor (CLP) cell. In some embodiments, a donor cell is one or more of an erythroid progenitor cell (e.g., an MEP cell). In some embodiments, a donor cell is one or more of a hematopoietic stem/progenitor cell (e.g., a long term HSC (LT-HSC), short term HSC (ST-HSC), MPP cell, or lineage restricted progenitor (LRP) cell). In certain embodiments, the donor cell is a CD34⁺ cell, CD34⁺CD90⁺ cell, CD34⁺CD38⁻ cell, CD34⁺CD90⁺CD49f⁺CD38⁺CD45RA; cell, CD105⁺ cell, CD31⁺, or CD133⁺ cell, or a CD34⁺CD90⁺ CD133⁺ cell. In some embodiments, a donor cell is one or more of an umbilical cord blood CD34⁺ HSPC, umbilical cord venous endothelial cell, umbilical cord arterial endothelial cell, amniotic fluid CD34⁺ cell, amniotic fluid endothelial cell, placental endothelial cell, or placental hematopoietic CD34⁺ cell. In some embodiments, a donor cell is one or more of a mobilized peripheral blood hematopoietic CD34⁺ cell (after the subject is treated with a mobilization agent, e.g., G-CSF or Plerixafor). In some embodiments, a donor cell is a peripheral blood endothelial cell. In some embodiments, a donor cell is a peripheral blood natural killer cell.

[0340] In some embodiments, a donor cell is a dividing cell. In some embodiments, a donor cell is a non-dividing cell.

[0341] In some embodiments, a genetically modified (e.g., edited) iNK cell resulting from one or more methods and/or strategies described herein, are administered to a subject in need thereof, e.g., in the context of an immuno-oncology therapeutic approach. In some embodiments, donor cells, or any cells of any stage of the reprogramming, differentiating, and/or genetic engineering strategies provided herein, can be maintained in culture or stored (e.g., frozen in liquid nitrogen) using any suitable method known in the art, e.g., for subsequent characterization or administration to a subject in need thereof.

### Genetically Modified Cells

### Loss-of-Function Modifications

[0342] In some embodiments, a target cell described herein (e.g., an NK cell or a stem cell (e.g., iPSC) described herein) is genetically engineered to introduce a disruption (e.g., a knockout) in one or more targets described herein. For example, in some embodiments, a target cell described herein (e.g., an NK cell or a stem cell (e.g., iPSC) described herein) can be genetically engineered to knockout all or a portion of one or more target gene, introduce a frameshift in one or more target genes, and/or cause a truncation of an encoded gene product (e.g., by introducing a premature stop codon). In some embodiments, a target cell described herein (e.g., an NK cell or a stem cell (e.g., iPSC) described herein) can be genetically engineered to knockout all or a portion of a target gene using a gene-editing system, e.g., as described herein. In some such embodiments, a gene-editing system may be or comprise a CRISPR system, a zinc finger nuclease system, a TALEN, and/or a meganuclease.

[0343] In some embodiments, the present disclosure provides methods suitable for high-efficiency knockout (e.g., a high proportion of a cell population comprises a knockout). In some embodiments, high-efficiency knockout results in at least 65% of the cells in a population of cells comprising a knockout (e.g., at least 65%, at least 70%, at least 75%, at least 80%, at least 85%, at least 90%, at least 91%, at least 92%, at least 93%, at least 94%, at least 95%, at least 96%, at least 97%, at least 98%, or at least 99% of the cells in a population of cells comprise a knockout).

[0344] In certain embodiments, the disclosure provides a genetically engineered target cell described herein (e.g., an NK cell or a stem cell (e.g., iPSC) described herein), and/or progeny cell, comprising a disruption in TGF signaling, e.g., TGF beta signaling. In some embodiments, this is useful, for example, in circumstances where it is desirable to generate a differentiated cell (e.g., an NK cell) from pluripotent stem cell, wherein TGF signaling, e.g., TGF beta signaling is disrupted in the differentiated cell.

[0345] TGF beta signaling inhibits or decreases the survival and/or activity of some differentiated cell types that are useful for therapeutic applications, e.g., TGF beta signaling is a negative regulator of natural killer cells, which can be used in immunotherapeutic applications. In some embodiments, it is desirable to generate a clinically effective number of natural killer cells comprising a genetic modification that disrupts TGF beta signaling, thus avoiding the negative effect of TGF beta on the clinical effectiveness of such cells. It is advantageous, in some embodiments, to source such NK cells from a pluripotent stem cell, instead, for example, from mature NK cells obtained from a donor. Modifying a stem cell instead of a differentiated cell has, among others, the advantage of allowing for clonal derivation, characterization, and/or expansion of a specific genotype, e.g., a specific stem cell clone harboring a specific genetic modification (e.g., a targeted disruption of TGFβRII in the absence of any undesired (e.g., off-target) modifications). In some embodiments, a stem cell, e.g., a human iPSC, is genetically engineered not to express one or more TGFβ receptor, e.g., TGFβRII, or to express a dominant negative variant of a TGFβ receptor, e.g., a dominant negative TGFβRII variant. Exemplary sequences of TGFβRII are set forth in KR710923.1, NM_001024847.2, and NM_003242.5. An exemplary dominant negative TGFβRII is disclosed in Immunity. 2000 February; 12(2):171-81.

[0346] In certain embodiments, the disclosure provides a genetically engineered target cell described herein (e.g., an NK cell or a stem cell (e.g., iPSC) described herein), and/or progeny cell, that additionally or alternatively comprises a disruption in interleukin signaling, e.g., IL-15 signaling. IL-15 is a cytokine with structural similarity to Interleukin-2 (IL-2), which binds to and signals through a complex composed of IL-2/IL-15 receptor beta chain (CD122) and the common gamma chain (gamma-C, CD132). Exemplary sequences of IL-15 are provided in NG_029605.2. Disruption of IL-15 signaling may be useful, for example, in circumstances where it is desirable to generate a differentiated cell from a pluripotent stem cell, but with certain signaling pathways (e.g., IL-15) disrupted in the differentiated cell. IL-15 signaling can inhibit or decrease survival and/or activity of some types of differentiated cells, such as cells that may be useful for therapeutic applications. For example, IL-15 signaling is a negative regulator of natural killer (NK) cells.

[0347] CISH (encoded by the CISH gene) is downstream of the IL-15 receptor and can act as a negative regulator of IL-15 signaling in NK cells. As used herein, the term “CISH” refers to the Cytokine Inducible SH2 Containing Protein (see, e.g., Delconte et al., Nat Immunol. 2016 July; 17(7):816-24; exemplary sequences for CISH are set forth as NG_023194.1). In some embodiments, disruption of CISH regulation may increase activation of Jak/STAT pathways, leading to increased survival, proliferation and/or effector functions of NK cells. Thus, in some embodiments, genetically engineered NK cells (e.g., iNK cells, e.g., generated from genetically engineered hiPSCs comprising a disruption of CISH regulation) exhibit greater responsiveness to IL-15-mediated signaling than non-genetically engineered NK cells. In some such embodiments, genetically engineered NK cells exhibit greater effector function relative to non-genetically engineered NK cells.

[0348] In some embodiments, a genetically engineered NK cell, stem cell and/or progeny cell, additionally or alternatively, comprises a disruption and/or loss of function in one or more of B2M, NKG2A, PD1, TIGIT, ADORA2a, CIITA, HLA class II histocompatibility antigen alpha chain genes, HLA class II histocompatibility antigen beta chain genes, CD32B, or TRAC.

[0349] As used herein, the term “B2M” (β2 microglobulin) refers to a serum protein found in association with the major histocompatibility complex (MHC) class I heavy chain on the surface of nearly all nucleated cells. Exemplary sequences for B2M are set forth as NG 012920.2.

[0350] As used herein, the term “NKG2A” (natural killer group 2A) refers to a protein belonging to the killer cell lectin-like receptor family, also called NKG2 family, which is a group of transmembrane proteins preferentially expressed in NK cells. This family of proteins is characterized by the type II membrane orientation and the presence of a C-type lectin domain. See, e.g., Kamiya-T et al., J Clin Invest 2019 https://doi.org/10.1172/JCI123955. Exemplary sequences for NKG2A are set forth as AF461812.1.

[0351] As used herein, the term “PD1” (Programmed cell death protein 1), also known CD279 (cluster of differentiation 279), refers to a protein found on the surface of cells that has a role in regulating the immune system's response to the cells of the human body by down-regulating the immune system and promoting self-tolerance by suppressing T cell inflammatory activity. PD1 is an immune checkpoint and guards against autoimmunity. Exemplary sequences for PD1 are set forth as NM_005018.3.

[0352] As used herein, the term “TIGIT” (T cell immunoreceptor with Ig and ITIM domains) refers to a member of the PVR (poliovirus receptor) family of immunoglobulin proteins. The product of this gene is expressed on several classes of T cells including follicular B helper T cells (TFH). Exemplary sequences for TIGIT are set forth in NM 173799.4.

[0353] As used herein, the term “ADORA2A” refers to the adenosine A2a receptor, a member of the guanine nucleotide-binding protein (G protein)-coupled receptor (GPCR) superfamily, which is subdivided into classes and subtypes. This protein, an adenosine receptor of A2A subtype, uses adenosine as the preferred endogenous agonist and preferentially interacts with the G(s) and G(olf) family of G proteins to increase intracellular cAMP levels. Exemplary sequences of ADORA2a are provided in NG_052804.1.

[0354] As used herein, the term “CIITA” refers to the protein located in the nucleus that acts as a positive regulator of class II major histocompatibility complex gene transcription, and is referred to as the “master control factor” for the expression of these genes. The protein also binds GTP and uses GTP binding to facilitate its own transport into the nucleus. Mutations in this gene have been associated with bare lymphocyte syndrome type II (also known as hereditary MHC class II deficiency or HLA class II-deficient combined immunodeficiency), increased susceptibility to rheumatoid arthritis, multiple sclerosis, and possibly myocardial infarction. See, e.g., Chang et al., J Exp Med 180: 1367-1374; and Chang et al., Immunity. 1996 February; 4(2): 167-78, the entire contents of each of which are incorporated by reference herein. An exemplary sequence of CIITA is set forth as NG_009628.1.

[0355] In some embodiments, two or more HLA class II histocompatibility antigen alpha chain genes and/or two or more HLA class II histocompatibility antigen beta chain genes are disrupted, e.g., knocked out, e.g., by genomic editing. For example, in some embodiments, two or more HLA class II histocompatibility antigen alpha chain genes selected from HLA-DQA1, HLA-DRA, HLA-DPA1, HLA-DMA, HLA-DQA2, and HLA-DOA are disrupted, e.g., knocked out. For another example, in some embodiments, two or more HLA class II histocompatibility antigen beta chain genes selected from HLA-DMB, HLA-DOB, HLA-DPB1, HLA-DQB1, HLA-DQB3, HLA-DQB2, HLA-DRB1, HLA-DRB3, HLA-DRB4, and HLA-DRB5 are disrupted, e.g., knocked out. See, e.g., Crivello et al., J Immunol January 2019, ji1800257; DOI: https://doi.org/10.4049/jimmunol.1800257, the entire contents of which are incorporated herein by reference.

[0356] As used herein, the term “CD32B” (cluster of differentiation 32B) refers to a low affinity immunoglobulin gamma Fc region receptor II-b protein that, in humans, is encoded by the FCGR2B gene. See, e.g., Rankin-CT et al., Blood 2006 108(7):2384-91, the entire contents of which are incorporated herein by reference.

[0357] As used herein, the term “TRAC” refers to the T-cell receptor alpha subunit (constant), encoded by the TRAC locus.

### Gain-of-Function Modifications

[0358] In some embodiments, a target cell described herein (e.g., an NK cell or a stem cell (e.g., iPSC) described herein) can additionally be genetically engineered to comprise a genetic modification that leads to expression of one or more gene products of interest described herein using, e.g., a gene-editing system, e.g., as described herein. In some such embodiments, a gene-editing system may be or comprise a CRISPR system, a zinc finger nuclease system, a TALEN, and/or a meganuclease.

[0359] In some embodiments, a cell is produced by a method of the present disclosure, e.g., a method that comprises contacting the cell with a nuclease that causes a break within an endogenous coding sequence of an essential gene in the cell wherein the essential gene encodes at least one gene product that is required for survival and/or proliferation of the cell. The cell is also contacted with a donor template that comprises a knock-in cassette comprising an exogenous coding sequence for a gene product of interest in frame with and downstream (3′) of an exogenous coding sequence or partial coding sequence of the essential gene. The knock-in cassette is integrated into the genome of the cell by homology-directed repair (HDR) of the break, resulting in a genome-edited cell that expresses the gene product of interest and the gene product encoded by the essential gene that is required for survival and/or proliferation of the cell, or a functional variant thereof. This is illustrated in FIG. 3 for an exemplary method. In some embodiments, a cell is contacted with a donor template that comprises a knock-in cassette comprising an exogenous coding sequence for a gene product of interest in frame with and upstream (5′) of an exogenous coding sequence or partial coding sequence of the essential gene.

[0360] In some embodiments, the cell comprises a genome with an exogenous coding sequence for a gene product of interest in frame with and downstream (3′) of a coding sequence of an essential gene, wherein the essential gene encodes a gene product that is required for survival and/or proliferation of the cell.

[0361] In some embodiments, the cell comprises a genome with an exogenous coding sequence for a gene product of interest in frame with and upstream (5′) of a coding sequence of an essential gene, wherein the essential gene encodes a gene product that is required for survival and/or proliferation of the cell.

[0362] In some embodiments, the cell comprises a genomic modification, wherein the genomic modification comprises an insertion of an exogenous knock-in cassette within an endogenous coding sequence of an essential gene in the cell's genome, wherein the essential gene encodes a gene product that is required for survival and/or proliferation of the cell, wherein the knock-in cassette comprises an exogenous coding sequence for a gene product of interest in frame with and downstream (3′) of an exogenous coding sequence or partial coding sequence encoding the gene product of the essential gene, or a functional variant thereof, and wherein the cell expresses the gene product of interest and the gene product encoded by the essential gene that is required for survival and/or proliferation of the cell, or a functional variant thereof. In some embodiments, the gene product of interest and the gene product encoded by the essential gene are expressed from the endogenous promoter of the essential gene.

### Donor Template

[0363] In one aspect the present disclosure provides a donor template comprising a knock-in cassette with an exogenous coding sequence for a gene product of interest in frame with and downstream (3′) of an exogenous coding sequence or partial coding sequence of an essential gene, wherein the essential gene encodes a gene product that is required for survival and/or proliferation of the cell.

[0364] In one aspect the present disclosure provides an impetus for designing donor templates comprising a knock-in cassette with an exogenous coding sequence for a gene product of interest in frame with and upstream (5′) of an exogenous coding sequence or partial coding sequence of an essential gene, wherein the essential gene encodes a gene product that is required for survival and/or proliferation of the cell; see e.g., FIG. 3D.

[0365] In some embodiments, the donor template is for use in editing the genome of a cell by homology-directed repair (HDR).

[0366] Donor template design is described in detail in the literature, for instance in PCT Publication No. WO2016/073990A1. Donor templates can be single-stranded or double-stranded and can be used to facilitate HDR-based repair of double-strand breaks (DSBs), and are particularly useful for inserting a new sequence into the target sequence, or replacing the target sequence altogether. In some embodiments, the donor template is a donor DNA template. In some embodiments the donor DNA template is double-stranded.

[0367] Whether single-stranded or double stranded, donor templates generally include regions that are homologous to regions of DNA within or near (e.g., flanking or adjoining) a target sequence to be cleaved. These homologous regions are referred to herein as “homology arms,” and are illustrated schematically below relative to the knock-in cassette (which may be separated from one or both of the homology arms by additional spacer sequences that are not shown):
[0368] [5′ homology arm]-[knock-in cassette]-[3′ homology arm].

[0369] The homology arms can have any suitable length (including 0 nucleotides if only one homology arm is used), and 5′ and 3′ homology arms can have the same length, or can differ in length. The selection of appropriate homology arm lengths can be influenced by a variety of factors, such as the desire to avoid homologies or microhomologies with certain sequences such as Alu repeats or other very common elements. For example, a 5′ homology arm can be shortened to avoid a sequence repeat element. In other embodiments, a 3′ homology arm can be shortened to avoid a sequence repeat element. In some embodiments, both the 5′ and the 3′ homology arms can be shortened to avoid including certain sequence repeat elements.

[0370] A donor template can be a nucleic acid vector, such as a viral genome or circular double-stranded DNA, e.g., a plasmid. Nucleic acid vectors comprising donor templates can include other coding or non-coding elements. For example, a donor template nucleic acid can be delivered as part of a viral genome (e.g., in an AAV, adenoviral, Sendai virus, or lentiviral genome) that includes certain genomic backbone elements (e.g., inverted terminal repeats, in the case of an AAV genome). In some embodiments, a donor template is comprised in a plasmid that has not been linearized. In some embodiments, a donor template is comprised in a plasmid that has been linearized. In some embodiments, a donor template is comprised within a linear dsDNA fragment. In some embodiments, a donor template nucleic acid can be delivered as part of an AAV genome. In some embodiments, a donor template nucleic acid can be delivered as a single stranded oligo donor (ssODN), for example, as a long multi-kb ssODN derived from m13 phage synthesis, or alternatively, short ssODNs, e.g., that comprise small genes of interest, tags, and/or probes. In some embodiments, a donor template nucleic acid can be delivered as a Doggybone™ DNA (dbDNA™) template. In some embodiments, a donor template nucleic acid can be delivered as a DNA minicircle. In some embodiments, a donor template nucleic acid can be delivered as an Integration-deficient Lentiviral Particle (IDLV). In some embodiments, a donor template nucleic acid can be delivered as a MMLV-derived retrovirus. In some embodiments, a donor template nucleic acid can be delivered as a piggyBac™ sequence. In some embodiments, a donor template nucleic acid can be delivered as a replicating EBNA1 episome.

[0371] In certain embodiments, the 5′ homology arm may be about 25 to about 1,000 base pairs in length, e.g., at least about 100, 200, 400, 600, or 800 base pairs in length. In certain embodiments, the 5′ homology arm comprises about 50 to 800 base pairs, e.g., 100 to 800, 200 to 800, 400 to 800, 400 to 600, or 600 to 800 base pairs. In certain embodiments, the 3′ homology arm may be about 25 to about 1,000 base pairs in length, e.g., at least about 100, 200, 400, 600, or 800 base pairs in length. In certain embodiments, the 3′ homology arm comprises about 50 to 800 base pairs, e.g., 100 to 800, 200 to 800, 400 to 800, 400 to 600, or 600 to 800 base pairs. In certain embodiments, the 5′ and 3′ homology arms are symmetrical in length. In certain embodiments, the 5′ and 3′ homology arms are asymmetrical in length.

[0372] In certain embodiments, a 5′ homology arm is less than about 3,000 base pairs, less than about 2,900 base pairs, less than about 2,800 base pairs, less than about 2,700 base pairs, less than about 2,600 base pairs, less than about 2,500 base pairs, less than about 2,400 base pairs, less than about 2,300 base pairs, less than about 2,200 base pairs, less than about 2,100 base pairs, less than about 2,000 base pairs, less than about 1,900 base pairs, less than about 1,800 base pairs, less than about 1,700 base pairs, less than about 1,600 base pairs, less than about 1,500 base pairs, less than about 1,400 base pairs, less than about 1,300 base pairs, less than about 1,200 base pairs, less than about 1,100 base pairs, less than about 1,000 base pairs, less than about 900 base pairs, less than about 800 base pairs, less than about 700 base pairs, less than about 600 base pairs, less than about 500 base pairs, or less than about 400 base pairs.

[0373] In certain embodiments, e.g., where a viral vector is utilized to introduce a knock-in cassette through a method described herein, a 5′ homology arm is less than about 1,000 base pairs, less than about 900 base pairs, less than about 800 base pairs, is less than about 700 base pairs, less than about 600 base pairs, less than about 500 base pairs, less than about 400 base pairs, or less than about 300 base pairs. In certain embodiments, e.g., where a viral vector is utilized to introduce a knock-in cassette through a method described herein, a 5′ homology arm is about 400-600 base pairs, e.g., about 500 base pairs.

[0374] In certain embodiments, a 3′ homology arm is less than about 3,000 base pairs, less than about 2,900 base pairs, less than about 2,800 base pairs, less than about 2,700 base pairs, less than about 2,600 base pairs, less than about 2,500 base pairs, less than about 2,400 base pairs, less than about 2,300 base pairs, less than about 2,200 base pairs, less than about 2,100 base pairs, less than about 2,000 base pairs, less than about 1,900 base pairs, less than about 1,800 base pairs, less than about 1,700 base pairs, less than about 1,600 base pairs, less than about 1,500 base pairs, less than about 1,400 base pairs, less than about 1,300 base pairs, less than about 1,200 base pairs, less than about 1,100 base pairs, less than 1,000 base pairs, less than about 900 base pairs, less than about 800 base pairs, less than about 700 base pairs, less than about 600 base pairs, less than about 500 base pairs, or less than about 400 base pairs.

[0375] In certain embodiments, e.g., where a viral vector is utilized to introduce a knock-in cassette through a method described herein, a 3′ homology arm is less than about 1,000 base pairs, less than about 900 base pairs, less than about 800 base pairs, less than about 700 base pairs, less than about 600 base pairs, less than about 500 base pairs, less than about 400 base pairs, or less than about 300 base pairs. In certain embodiments, e.g., where a viral vector is utilized to introduce a knock-in cassette through a method described herein, a 3′ homology arm is about 400-600 base pairs, e.g., about 500 base pairs.

[0376] In certain embodiments, the 5′ and 3′ homology arms flank the break and are less than 100, 75, 50, 25, 15, 10 or 5 base pairs away from an edge of the break. In certain embodiments, the 5′ and 3′ homology arms flank an endogenous stop codon. In certain embodiments, the 5′ and 3′ homology arms flank a break located within about 500 base pairs (e.g., about 500 base pairs, about 450 base pairs, about 400 base pairs, about 350 base pairs, about 300 base pairs, about 250 base pairs, about 200 base pairs, about 150 base pairs, about 100 base pairs, about 50 base pairs, or about 25 base pairs) upstream (5′) of an endogenous stop codon, e.g., the stop codon of an essential gene. In certain embodiments, the 5′ homology arm encompasses an edge of the break.

### Knock-In Cassette

[0377] In some embodiments, the knock-in cassette within the donor template comprises an exogenous coding sequence for the gene product of interest in frame with and downstream (3′) of an exogenous coding sequence or partial coding sequence of the essential gene. In some embodiments, a knock-in cassette within a donor template comprises an exogenous coding sequence for the gene product of interest in frame with and upstream (5′) of an exogenous coding sequence or partial coding sequence of an essential gene. In some embodiments, the knock-in cassette is a polycistronic knock-in cassette. In some embodiments, the knock-in cassette is a bicistronic knock-in cassette. In some embodiment the knock-in cassette does not comprise a reporter gene, e.g., a fluorescent reporter gene or an antibiotic resistance gene.

[0378] In some embodiments, a single essential gene locus will be targeted by two knock-in cassettes comprising different “cargo” sequences. In some embodiments, one allele will incorporate one knock-in cassette, while the other allele will incorporate the other knock-in cassette. In some embodiments, a gRNA utilized to generate an appropriate DNA break may be the same for each of the two different knock-in cassettes. In some embodiments, gRNAs utilized to generate appropriate DNA breaks for each of the two different knock-in cassettes may be different, such that the “cargo” sequence is incorporated at a different position for each allele. In some embodiments, such a different position for each allele may still be within the ultimate exons coding region. In some embodiments, such a different position for each allele may be within the penultimate exon (second to last), and/or ultimate (last) exons coding region. In some embodiments, such a different position for at least one of the alleles may be within the first exon. In some embodiments, such a different position for at least one of the alleles may be within the first or second exon.

[0379] In order to properly restore the essential gene coding region in the genetically modified cell (so that a functioning gene product is produced) the knock-in cassette does not need to comprise an exogenous coding sequence that corresponds to the entire coding sequence of the essential gene. Indeed, depending on the location of the break in the endogenous coding sequence of the essential gene it may be possible to restore the essential gene by providing a knock-in cassette that comprises a partial coding sequence of the essential gene, e.g., that corresponds to a portion of the endogenous coding sequence of the essential gene that spans the break and the entire region downstream of the break (minus the stop codon), and/or that corresponds to a portion of the endogenous coding sequence of the essential gene that spans the break and the entire region upstream of the break (up to and optionally including the start codon).

[0380] In order to minimize the size of the knock-in cassette it may in fact be advantageous, in some embodiments, to have the break located within the last 1500, 1000, 750, 500, 400, 300, 200, 100, or 50 base pairs of the endogenous coding sequence of the essential gene, i.e., towards the 3′ end of the coding sequence. In some embodiments, a base pair's location in a coding sequence may be defined 3′-to-5′ from an endogenous translational stop signal (e.g., a stop codon). In some embodiments, as used herein, an “endogenous coding sequence” can include both exonic and intronic base pairs, and refers to gene sequence occurring 5′ to an endogenous functional translational stop signal. In some embodiments, a break within an endogenous coding sequence comprises a break within one DNA strand. In some embodiments, a break within an endogenous coding sequence comprises a break within both DNA strands. In some embodiments, a break is located within the last 1000 base pairs of the endogenous coding sequence. In some embodiments, a break is located within the last 750 base pairs of the endogenous coding sequence. In some embodiments, a break is located within the last 600 base pairs of the endogenous coding sequence. In some embodiments, a break is located within the last 500 base pairs of the endogenous coding sequence. In some embodiments, a break is located within the last 400 base pairs of the endogenous coding sequence. In some embodiments, a break is located within the last 300 base pairs of the endogenous coding sequence. In some embodiments, a break is located within the last 250 base pairs of the endogenous coding sequence. In some embodiments, a break is located within the last 200 base pairs of the endogenous coding sequence. In some embodiments, a break is located within the last 150 base pairs of the endogenous coding sequence. In some embodiments, a break is located within the last 100 base pairs of the endogenous coding sequence. In some embodiments, a break is located within the last 75 base pairs of the endogenous coding sequence. In some embodiments, a break is located within the last 50 base pairs of the endogenous coding sequence. In some embodiments, a break is located within the last 21 base pairs of the endogenous coding sequence.

[0381] In some embodiments, the exogenous partial coding sequence of the essential gene in the knock-in cassette encodes a C-terminal fragment of a protein encoded by the essential gene, e.g., a fragment that is less than 500, 250, 150, 125, 100, 75, 50, 25, 20, 15 or 10 amino acids in length. In some embodiments, the exogenous partial coding sequence of the essential gene in the knock-in cassette is codon optimized. In some embodiments, the exogenous partial coding sequence of the essential gene in the knock-in cassette is codon optimized to eliminate at least one PAM site. In some embodiments, the exogenous partial coding sequence of the essential gene in the knock-in cassette is codon optimized to eliminate more than one PAM site. In some embodiments, the exogenous partial coding sequence of the essential gene in the knock-in cassette is codon optimized to eliminate all relevant nuclease specific PAM sites. In some embodiments, a C-terminal fragment of a protein encoded by the essential gene is about 140 amino acids in length. In some embodiments, a C-terminal fragment of a protein encoded by the essential gene is about 130 amino acids in length. In some embodiments, a C-terminal fragment of a protein encoded by the essential gene is about 120 amino acids in length. In some embodiments, the C-terminal fragment includes an amino acid sequence that is encoded by a region of the endogenous coding sequence of the essential gene that spans the break. In some embodiments, a C-terminal fragment includes an amino acid sequence that is encoded by a region of the endogenous coding sequence within 1 exon of the essential gene. In some embodiments, a C-terminal fragment includes an amino acid sequence that is encoded by a region of the endogenous coding sequence within 2 exons of the essential gene. In some embodiments, a C-terminal fragment includes an amino acid sequence that is encoded by a region of the endogenous coding sequence within 3 exons of the essential gene. In some embodiments, a C-terminal fragment includes an amino acid sequence that is encoded by a region of the endogenous coding sequence within 4 exons of the essential gene. In some embodiments, a C-terminal fragment includes an amino acid sequence that is encoded by a region of the endogenous coding sequence within 5 exons of the essential gene.

[0382] In some embodiments, the exogenous partial coding sequence of an essential gene in a knock-in cassette encodes a C-terminal fragment of a protein encoded by an essential gene, e.g., a fragment that is less than 500, 250, 150, 125, 100, 75, 50, 25, 20, 19, 18, 17, 16, 15, 14, 13, 12, 11, 10, 9, 8, or 7 amino acids in length. In some embodiments, the exogenous partial coding sequence of an essential gene in a knock-in cassette encodes a 20 amino acid C-terminal fragment of a protein encoded by an essential gene. In some embodiments, the exogenous partial coding sequence of an essential gene in a knock-in cassette encodes a 19 amino acid C-terminal fragment of a protein encoded by an essential gene. In some embodiments, the exogenous partial coding sequence of an essential gene in a knock-in cassette encodes an 18 amino acid C-terminal fragment of a protein encoded by an essential gene. In some embodiments, the exogenous partial coding sequence of an essential gene in a knock-in cassette encodes a 17 amino acid C-terminal fragment of a protein encoded by an essential gene. In some embodiments, the exogenous partial coding sequence of an essential gene in a knock-in cassette encodes a 16 amino acid C-terminal fragment of a protein encoded by an essential gene. In some embodiments, the exogenous partial coding sequence of an essential gene in a knock-in cassette encodes a 1 amino acid C-terminal fragment of a protein encoded by an essential gene.

[0383] In some embodiments, e.g., when the essential gene includes many exons as shown in the exemplary method of FIG. 3A, it may be advantageous to have the break within the last exon of the essential gene. In some embodiments, e.g., when the essential gene includes many exons as shown in the exemplary method of FIG. 3A, it may be advantageous to have the break within the penultimate exon of the essential gene. It is to be understood however that the present disclosure is not limited to any particular location for the break and that the available positions will vary depending on the nature and length of the essential gene and the length of the exogenous coding sequence for the gene product of interest. For example, for essential genes that include a few exons or when the gene product of interest is small it may be possible to locate the break in an upstream exon.

[0384] In order to minimize the size of the knock-in cassette it may in fact be advantageous, in some embodiments, to have the break located within the first 1500, 1000, 750, 500, 400, 300, 200, 100, or 50 base pairs of an endogenous coding sequence of the essential gene, i.e., starting from the 5′ end of a coding sequence. In some embodiments, a base pair's location in a coding sequence may be defined 5′-to-3′ from an endogenous translational start signal (e.g., a start codon). In some embodiments, as used herein, an “endogenous coding sequence” can include both exonic and intronic base pairs, and refers to gene sequence occurring 3′ to an endogenous functional translational start signal. In some embodiments, a break within an endogenous coding sequence comprises a break within one DNA strand. In some embodiments, a break within an endogenous coding sequence comprises a break within both DNA strands. In some embodiments, a break is located within the first 1000 base pairs of the endogenous coding sequence. In some embodiments, a break is located within the first 750 base pairs of an endogenous coding sequence. In some embodiments, a break is located within the first 600 base pairs of the endogenous coding sequence. In some embodiments, a break is located within the first 500 base pairs of the endogenous coding sequence. In some embodiments, a break is located within the first 400 base pairs of the endogenous coding sequence. In some embodiments, a break is located within the first 300 base pairs of the endogenous coding sequence. In some embodiments, a break is located within the first 250 base pairs of the endogenous coding sequence. In some embodiments, a break is located within the first 200 base pairs of the endogenous coding sequence. In some embodiments, a break is located within the first 150 base pairs of the endogenous coding sequence. In some embodiments, a break is located within the first 100 base pairs of the endogenous coding sequence. In some embodiments, a break is located within the first 75 base pairs of the endogenous coding sequence. In some embodiments, a break is located within the first 50 base pairs of the endogenous coding sequence. In some embodiments, a break is located within the first 21 base pairs of the endogenous coding sequence.

[0385] In some embodiments, the exogenous partial coding sequence of the essential gene in the knock-in cassette encodes an N-terminal fragment of a protein encoded by the essential gene, e.g., a fragment that is less than 500, 250, 150, 125, 100, 75, 50, 25, 20, 15 or 10 amino acids in length. In some embodiments, an N-terminal fragment of a protein encoded by the essential gene is about 140 amino acids in length. In some embodiments, an N-terminal fragment of a protein encoded by the essential gene is about 130 amino acids in length. In some embodiments, an N-terminal fragment of a protein encoded by the essential gene is about 120 amino acids in length. In some embodiments, an N-terminal fragment includes an amino acid sequence that is encoded by a region of the endogenous coding sequence of the essential gene that spans the break. In some embodiments, an N-terminal fragment includes an amino acid sequence that is encoded by a region of the endogenous coding sequence within 1 exon of the essential gene. In some embodiments, an N-terminal fragment includes an amino acid sequence that is encoded by a region of the endogenous coding sequence within 2 exons of the essential gene. In some embodiments, an N-terminal fragment includes an amino acid sequence that is encoded by a region of the endogenous coding sequence within 3 exons of the essential gene. In some embodiments, an N-terminal fragment includes an amino acid sequence that is encoded by a region of the endogenous coding sequence within 4 exons of the essential gene. In some embodiments, an N-terminal fragment includes an amino acid sequence that is encoded by a region of the endogenous coding sequence within 5 exons of the essential gene.

[0386] In some embodiments, the exogenous partial coding sequence of an essential gene in a knock-in cassette encodes an N-terminal fragment of a protein encoded by an essential gene, e.g., a fragment that is less than 500, 250, 150, 125, 100, 75, 50, 25, 20, 19, 18, 17, 16, 15, 14, 13, 12, 11, 10, 9, 8, or 7 amino acids in length. In some embodiments, the exogenous partial coding sequence of an essential gene in a knock-in cassette encodes a 20 amino acid N-terminal fragment of a protein encoded by an essential gene. In some embodiments, the exogenous partial coding sequence of an essential gene in a knock-in cassette encodes a 19 amino acid N-terminal fragment of a protein encoded by an essential gene. In some embodiments, the exogenous partial coding sequence of an essential gene in a knock-in cassette encodes an 18 amino acid N-terminal fragment of a protein encoded by an essential gene. In some embodiments, the exogenous partial coding sequence of an essential gene in a knock-in cassette encodes a 17 amino acid N-terminal fragment of a protein encoded by an essential gene. In some embodiments, the exogenous partial coding sequence of an essential gene in a knock-in cassette encodes a 16 amino acid N-terminal fragment of a protein encoded by an essential gene. In some embodiments, the exogenous partial coding sequence of an essential gene in a knock-in cassette encodes a 1 amino acid N-terminal fragment of a protein encoded by an essential gene.

[0387] In some embodiments, the exogenous coding sequence or partial coding sequence of the essential gene in the knock-in cassette is less than 100% identical to the corresponding endogenous coding sequence of the essential gene of the cell, e.g., less than 99%, 98%, 97%, 96%, 95%, 94%, 93%, 92%, 91%, 90%, 85%, 80%, 75%, 70%, 65%, 60%, 55% or less than 50% (i.e., when the two sequences are aligned using a standard pairwise sequence alignment tool that maximizes the alignment between the corresponding sequences). For example, in some embodiments, the exogenous coding sequence or partial coding sequence of the essential gene in the knock-in cassette is codon optimized relative to the corresponding endogenous coding sequence of the essential gene of the cell, e.g., to prevent further binding of a nuclease to the target site. Alternatively or additionally it may be codon optimized to reduce the likelihood of recombination after integration of the knock-in cassette into the genome of the cell and/or to increase expression of the gene product of the essential gene and/or the gene product of interest after integration of the knock-in cassette into the genome of the cell.

[0388] In some embodiments, a knock-in cassette comprises one or more nucleotides or base pairs that differ (e.g., are mutations) relative to an endogenous knock-in site. In some embodiments, such mutations in a knock-in cassette provide resistance to cutting by a nuclease. In some embodiments, such mutations in a knock-in cassette prevent a nuclease from cutting the target loci following homologous recombination. In some embodiments, such mutations in a knock-in cassette occur within one or more coding and/or non-coding regions of a target gene. In some embodiments, such mutations in a knock-in cassette are silent mutations. In some embodiments, such mutations in a knock-in cassette are silent and/or missense mutations.

[0389] In some embodiments, such mutations in a knock-in cassette occur within a target protospacer motif and/or a target protospacer adjacent motif (PAM) site. In some embodiments, a knock-in cassette includes a target protospacer motif and/or a PAM site that are saturated with silent mutations. In some embodiments, a knock-in cassette includes a target protospacer motif and/or a PAM site that are approximately 30%, 40%, 50%, 60%, 70%, 80%, or 90% saturated with silent mutations. In some embodiments, a knock-in cassette includes a target protospacer motif and/or a PAM site that are saturated with silent and/or missense mutations. In some embodiments, a knock-in cassette includes a target protospacer motif and/or a PAM site that comprise at least one mutation, at least 2 mutations, at least 3 mutations, at least 4 mutations, at least 5 mutations, at least 6 mutations, at least 7 mutations, at least 8 mutations, at least 9 mutations, at least 10 mutations, at least 11 mutations, at least 12 mutations, at least 13 mutations, at least 14 mutations, or at least 15 mutations.

[0390] In some embodiments, certain codons encoding certain amino acids in a target site cannot be mutated through codon-optimization without losing some portion of an endogenous proteins natural function. In some embodiments, certain codons encoding certain amino acids in a target site cannot be mutated through codon-optimization.

[0391] In some embodiments, the knock-in cassette is codon optimized in only a portion of the coding sequence. For example, in some embodiments, a knock-in cassette encodes a C-terminal fragment of a protein encoded by an essential gene, e.g., a fragment that is less than 500, 250, 150, 125, 100, 75, 50, 25, 20, 19, 18, 17, 16, 15, 14, 13, 12, 11, 10, 9, 8, or 7 amino acids in length. In some embodiments, the exogenous partial coding sequence of an essential gene in a knock-in cassette that has been codon optimized encodes a 20 amino acid C-terminal fragment of a protein encoded by an essential gene. In some embodiments, the exogenous partial coding sequence of an essential gene in a knock-in cassette that has been codon optimized encodes a 19 amino acid C-terminal fragment of a protein encoded by an essential gene. In some embodiments, the exogenous partial coding sequence of an essential gene in a knock-in cassette that has been codon optimized encodes an 18 amino acid C-terminal fragment of a protein encoded by an essential gene. In some embodiments, the exogenous partial coding sequence of an essential gene in a knock-in cassette that has been codon optimized encodes a 17 amino acid C-terminal fragment of a protein encoded by an essential gene. In some embodiments, the exogenous partial coding sequence of an essential gene in a knock-in cassette that has been codon optimized encodes a 16 amino acid C-terminal fragment of a protein encoded by an essential gene. In some embodiments, the exogenous partial coding sequence of an essential gene in a knock-in cassette that has been codon optimized encodes a 15 amino acid C-terminal fragment of a protein encoded by an essential gene. In some embodiments, the exogenous partial coding sequence of an essential gene in a knock-in cassette that has been codon optimized encodes a 14 amino acid C-terminal fragment of a protein encoded by an essential gene. In some embodiments, the exogenous partial coding sequence of an essential gene in a knock-in cassette that has been codon optimized encodes a 13 amino acid C-terminal fragment of a protein encoded by an essential gene. In some embodiments, the exogenous partial coding sequence of an essential gene in a knock-in cassette that has been codon optimized encodes a 12 amino acid C-terminal fragment of a protein encoded by an essential gene. In some embodiments, the exogenous partial coding sequence of an essential gene in a knock-in cassette that has been codon optimized encodes a 11 amino acid C-terminal fragment of a protein encoded by an essential gene. In some embodiments, the exogenous partial coding sequence of an essential gene in a knock-in cassette that has been codon optimized encodes a 10 amino acid C-terminal fragment of a protein encoded by an essential gene. In some embodiments, the exogenous partial coding sequence of an essential gene in a knock-in cassette that has been codon optimized encodes a 9 amino acid C-terminal fragment of a protein encoded by an essential gene. In some embodiments, the exogenous partial coding sequence of an essential gene in a knock-in cassette that has been codon optimized encodes an 8 amino acid C-terminal fragment of a protein encoded by an essential gene. In some embodiments, the exogenous partial coding sequence of an essential gene in a knock-in cassette that has been codon optimized encodes a 7 amino acid C-terminal fragment of a protein encoded by an essential gene. In some embodiments, the exogenous partial coding sequence of an essential gene in a knock-in cassette that has been codon optimized encodes a 6 amino acid C-terminal fragment of a protein encoded by an essential gene. In some embodiments, the exogenous partial coding sequence of an essential gene in a knock-in cassette that has been codon optimized encodes a 5 amino acid C-terminal fragment of a protein encoded by an essential gene. In some embodiments, the exogenous partial coding sequence of an essential gene in a knock-in cassette that has been codon optimized encodes an amino acid C-terminal fragment that is less than 5 amino acids of a protein encoded by an essential gene.

[0392] In some embodiments, the knock-in cassette is codon optimized in only a portion of the coding sequence. For example, in some embodiments, a knock-in cassette encodes an N-terminal fragment of a protein encoded by an essential gene, e.g., a fragment that is less than 500, 250, 150, 125, 100, 75, 50, 25, 20, 19, 18, 17, 16, 15, 14, 13, 12, 11, 10, 9, 8, or 7 amino acids in length. In some embodiments, the exogenous partial coding sequence of an essential gene in a knock-in cassette that has been codon optimized encodes a 20 amino acid N-terminal fragment of a protein encoded by an essential gene. In some embodiments, the exogenous partial coding sequence of an essential gene in a knock-in cassette that has been codon optimized encodes a 19 amino acid N-terminal fragment of a protein encoded by an essential gene. In some embodiments, the exogenous partial coding sequence of an essential gene in a knock-in cassette that has been codon optimized encodes an 18 amino acid N-terminal fragment of a protein encoded by an essential gene. In some embodiments, the exogenous partial coding sequence of an essential gene in a knock-in cassette that has been codon optimized encodes a 17 amino acid N-terminal fragment of a protein encoded by an essential gene. In some embodiments, the exogenous partial coding sequence of an essential gene in a knock-in cassette that has been codon optimized encodes a 16 amino acid N-terminal fragment of a protein encoded by an essential gene. In some embodiments, the exogenous partial coding sequence of an essential gene in a knock-in cassette that has been codon optimized encodes a 15 amino acid N-terminal fragment of a protein encoded by an essential gene. In some embodiments, the exogenous partial coding sequence of an essential gene in a knock-in cassette that has been codon optimized encodes a 14 amino acid N-terminal fragment of a protein encoded by an essential gene. In some embodiments, the exogenous partial coding sequence of an essential gene in a knock-in cassette that has been codon optimized encodes a 13 amino acid N-terminal fragment of a protein encoded by an essential gene. In some embodiments, the exogenous partial coding sequence of an essential gene in a knock-in cassette that has been codon optimized encodes a 12 amino acid N-terminal fragment of a protein encoded by an essential gene. In some embodiments, the exogenous partial coding sequence of an essential gene in a knock-in cassette that has been codon optimized encodes a 11 amino acid N-terminal fragment of a protein encoded by an essential gene. In some embodiments, the exogenous partial coding sequence of an essential gene in a knock-in cassette that has been codon optimized encodes a 10 amino acid N-terminal fragment of a protein encoded by an essential gene. In some embodiments, the exogenous partial coding sequence of an essential gene in a knock-in cassette that has been codon optimized encodes a 9 amino acid N-terminal fragment of a protein encoded by an essential gene. In some embodiments, the exogenous partial coding sequence of an essential gene in a knock-in cassette that has been codon optimized encodes an 8 amino acid N-terminal fragment of a protein encoded by an essential gene. In some embodiments, the exogenous partial coding sequence of an essential gene in a knock-in cassette that has been codon optimized encodes a 7 amino acid N-terminal fragment of a protein encoded by an essential gene. In some embodiments, the exogenous partial coding sequence of an essential gene in a knock-in cassette that has been codon optimized encodes a 6 amino acid N-terminal fragment of a protein encoded by an essential gene. In some embodiments, the exogenous partial coding sequence of an essential gene in a knock-in cassette that has been codon optimized encodes a 5 amino acid N-terminal fragment of a protein encoded by an essential gene. In some embodiments, the exogenous partial coding sequence of an essential gene in a knock-in cassette that has been codon optimized encodes an amino acid N-terminal fragment that is less than 5 amino acids of a protein encoded by an essential gene.

[0393] In some embodiments, the knock-in cassette comprises one or more sequences encoding a linker peptide, e.g., between an exogenous coding sequence or partial coding sequence of the essential gene and a “cargo” sequence and/or a regulatory element described herein. Such linker peptides are known in the art, any of which can be included in a knock-in cassette described herein. In some embodiments, the linker peptide comprises the amino acid sequence GSG.

[0394] In some embodiments, the knock-in cassette comprises other regulatory elements such as a polyadenylation sequence, and optionally a 3′ UTR sequence, downstream of the exogenous coding sequence for the gene product of interest. If a 3′UTR sequence is present, the 3′UTR sequence is positioned 3′ of the exogenous coding sequence and 5′ of the polyadenylation sequence.

[0395] In some embodiments, the knock-in cassette comprises other regulatory elements such as a 5′ UTR and a start codon, upstream of the exogenous coding sequence for the gene product of interest. If a 5′UTR sequence is present, the 5′UTR sequence is positioned 5′ of the “cargo” sequence and/or exogenous coding sequence.

### Exemplary Homology Arms (HA)

[0396] In certain embodiments, a donor template comprises a 5′ and/or 3′ homology arm homologous to region of a GAPDH locus. In some embodiments, a donor template comprises a 5′ homology arm comprising or consisting of the sequence of SEQ ID NO: 1, 2, or 3. In some embodiments, a 5′ homology arm comprises or consists of a sequence that is at least 85%, 90%, 95%, 98% or 99% identical to the sequence of SEQ ID NO: 1, 2, or 3. In some embodiments, a donor template comprises a 3′ homology arm comprising or consisting of the sequence of SEQ ID NO:4 or 5. In certain embodiments, a 3′ homology arm comprises or consists of a sequence that is at least 85%, 90%, 95%, 98% or 99% identical to the sequence of SEQ ID NO: 4 or 5.

[0397] In some embodiments, a donor template comprises a 5′ homology arm comprising SEQ ID NO: 1, and a 3′ homology arm comprising SEQ ID NO: 4. In some embodiments, a donor template comprises a 5′ homology arm comprising SEQ ID NO: 2, and a 3′ homology arm comprising SEQ ID NO: 4. In some embodiments, a donor template comprises a 5′ homology arm comprising SEQ ID NO: 3, and a 3′ homology arm comprising SEQ ID NO: 5.

[0398] In some embodiments, a stretch of sequence flanking a nuclease cleavage site may be duplicated in both a 5′ and 3′ homology arm. In some embodiments, such a duplication is designed to optimize HDR efficiency. In some embodiments, one of the duplicated sequences may be codon optimized, while the other sequence is not codon optimized. In some embodiments, both of the duplicated sequences may be codon optimized. In some embodiments, codon optimization may remove a target PAM site. In some embodiments, a duplicated sequence may be no more than: 100 bp in length, 90 bp in length, 80 bp in length, 70 bp in length, 60 bp in length, 50 bp in length, 40 bp in length, 30 bp in length, or 20 bp in length.

exemplary 5′ HA for knock-in cassette
insertion at GAPDH locus
SEQ ID NO: 1
GAAGACTGTGGATGGCCCCTCCGGGAAACTGTGGCGTGATGGCCG
CGGGGCTCTCCAGAACATCATCCCTGCCTCTACTGGCGCTGCCAA
GGCTGTGGGCAAGGTCATCCCTGAGCTGAACGGGAAGCTCACTGG
CATGGCCTTCCGTGTCCCCACTGCCAACGTGTCAGTGGTGGACCT
GACCTGCCGTCTAGAAAAACCTGCCAAATATGATGACATCAAGAA
GGTGGTGAAGCAGGCGTCGGAGGGCCCCCTCAAGGGCATCCTGGG
CTACACTGAGCACCAGGTGGTCTCCTCTGACTTCAACAGCGACAC
CCACTCCTCCACCTTTGACGCTGGGGCTGGCATTGCCCTCAACGA
CCACTTTGTCAAGCTCATTTCCTGGTATGTGGCTGGGGCCAGAGA
CTGGCTCTTAAAAAGTGCAGGGTCTGGCGCCCTCTGGTGGCTGGC
TCAGAAAAAGGGCCCTGACAACTCTTTACATCTTCTAGGTATGAC
AACGAGTTCGGATATAGCAATAGAGTGGTCGATCTGATGGCTCAT
ATGGCTAGCAAAGAG
exemplary 5′ HA for knock-in cassette
insertion at GAPDH locus
SEQ ID NO: 2
GAAGACTGTGGATGGCCCCTCCGGGAAACTGTGGCGTGATGGCCG
CGGGGCTCTCCAGAACATCATCCCTGCCTCTACTGGCGCTGCCAA
GGCTGTGGGCAAGGTCATCCCTGAGCTGAACGGGAAGCTCACTGG
CATGGCCTTCCGTGTCCCCACTGCCAACGTGTCAGTGGTGGACCT
GACCTGCCGTCTAGAAAAACCTGCCAAATATGATGACATCAAGAA
GGTGGTGAAGCAGGCGTCGGAGGGCCCCCTCAAGGGCATCCTGGG
CTACACTGAGCACCAGGTGGTCTCCTCTGACTTCAACAGCGACAC
CCACTCCTCCACCTTTGACGCTGGGGCTGGCATTGCCCTCAACGA
CCACTTTGTCAAGCTCATTTCCTGGTATGTGGCTGGGGCCAGAGA
CTGGCTCTTAAAAAGTGCAGGGTCTGGCGCCCTCTGGTGGCTGGC
TCAGAAAAAGGGCCCTGACAACTCTTTACATCTTCTAGGTATGAC
AACGAGTTCGGATATAGCAATAGAGTGGTCGATCTGATGGCTCAT
ATGGCTAGCAAAGAGGGAAGCGGAGCTACTAACTTCAGCCTGCTG
AAGCAGGCTGGAGACGTGGAGGAGAACCCTGGACCT
exemplary 5′ HA for knock-in cassette
insertion at GAPDH locus
SEQ ID NO: 3
GGCTTTCCCATAATTTCCTTTCAAGGTGGGGAGGGAGGTAGAGGG
GTGATGTGGGGAGTACGCTGCAGGGCCTCACTCCTTTTGCAGACC
ACAGTCCATGCCATCACTGCCACCCAGAAGACTGTGGATGGCCCC
TCCGGGAAACTGTGGCGTGATGGCCGCGGGGCTCTCCAGAACATC
ATCCCTGCCTCTACTGGCGCTGCCAAGGCTGTGGGCAAGGTCATC
CCTGAGCTGAACGGGAAGCTCACTGGCATGGCCTTCCGTGTCCCC
ACTGCCAACGTGTCAGTGGTGGACCTGACCTGCCGTCTAGAAAAA
CCTGCCAAATATGATGACATCAAGAAGGTGGTGAAGCAGGCGTCG
GAGGGCCCCCTCAAGGGCATCCTGGGCTACACTGAGCACCAGGTG
GTCTCCTCTGACTTCAACAGCGACACCCACTCCTCCACCTTTGAC
GCTGGGGCTGGCATTGCCCTCAACGACCACTTTGTCAAGCTCATC
TCTTGGTACGACAATGAGTTCGGATATAGCAATAGAGTGGTCGAT
CTGATGGCTCATATGGCTAGCAAAGAG
exemplary 3′ HA for knock-in cassette
insertion at GAPDH locus
SEQ ID NO: 4
ATTTGGCTACAGCAACAGGGTGGTGGACCTCATGGCCCACATGGC
CTCCAAGGAGTAAGACCCCTGGACCACCAGCCCCAGCAAGAGCAC
AAGAGGAAGAGAGAGACCCTCACTGCTGGGGAGTCCCTGCCACAC
TCAGTCCCCCACCACACTGAATCTCCCCTCCTCACAGTTGCCATG
TAGACCCCTTGAAGAGGGGAGGGGCCTAGGGAGCCGCACCTTGTC
ATGTACCATCAATAAAGTACCCTGTGCTCAACCAGTTACTTGTCC
TGTCTTATTCTAGGGTCTGGGGCAGAGGGGAGGGAAGCTGGGCTT
GTGTCAAGGTGAGACATTCTTGCTGGGGAGGGACCTGGTATGTTC
TCCTCAGACTGAGGGTAGGGCCTCCAAACAGCCTTGCTTGCTTCG
AGAACCATTTGCTTCCCGCTCAGACGTCTTGAGTGCTACAGGAAG
CTGGCACCACTACTTCAGAGAACAAGGCCTTTTCCTCTCCTCGCT
CCAGT
exemplary 3′ HA for knock-in cassette
insertion at GAPDH locus
SEQ ID NO: 5
AGACTGGCTCTTAAAAAGTGCAGGGTCTGGCGCCCTCTGGTGGCT
GGCTCAGAAAAAGGGCCCTGACAACTCTTTTCATCTTCTAGGTAT
GACAACGAATTTGGCTACAGCAACAGGGTGGTGGACCTCATGGCC
CACATGGCCTCCAAGGAGTAAGACCCCTGGACCACCAGCCCCAGC
AAGAGCACAAGAGGAAGAGAGAGACCCTCACTGCTGGGGAGTCCC
TGCCACACTCAGTCCCCCACCACACTGAATCTCCCCTCCTCACAG
TTGCCATGTAGACCCCTTGAAGAGGGGAGGGGCCTAGGGAGCCGC
ACCTTGTCATGTACCATCAATAAAGTACCCTGTGCTCAACCAGTT
ACTTGTCCTGTCTTATTCTAGGGTCTGGGGCAGAGGGGAGGGAAG
CTGGGCTTGTGTCAAGGTGAGACATTCTTGCTGGGGAGGGACCTG
GTATGTTCTCCTCAGACTGAGGGTAGGGCCTCCAAACAGCCTTGC
TTGCT

[0399] In some embodiments, a donor template comprises a 5′ and/or 3′ homology arm homologous to a region of a TBP locus. In some embodiments, a donor template comprises a 5′ homology arm comprising or consisting of the sequence of SEQ ID NO:6, 7, or 8. In some embodiments, a 5′ homology arm comprises or consists of a sequence that is at least 85%, 90%, 95%, 98% or 99% identical to the sequence of SEQ ID NO: 6, 7, or 8. In some embodiments, a donor template comprises a 3′ homology arm comprising or consisting of the sequence of SEQ ID NO:9, 10, or 11. In certain embodiments, a 3′ homology arm comprises or consists of a sequence that is at least 85%, 90%, 95%, 98% or 99% identical to the sequence of SEQ ID NO: 9, 10, or 11.

[0400] In some embodiments, a donor template comprises a 5′ homology arm comprising SEQ ID NO: 6, and a 3′ homology arm comprising SEQ ID NO: 9. In some embodiments, a donor template comprises a 5′ homology arm comprising SEQ ID NO: 7, and a 3′ homology arm comprising SEQ ID NO: 10. In some embodiments, a donor template comprises a 5′ homology arm comprising SEQ ID NO: 8, and a 3′ homology arm comprising SEQ ID NO: 11.

exemplary 5′ HA for knock-in cassette
insertion at TBP locus
SEQ ID NO: 6
GCAGACTTCCATTTACAGTGAGGAGGTGAGCATTGCATTGAACAA
AAGATGGCGTTTTCACTTGGAATTAGTTATCTGAAGCTTTAGGAT
TCCTCAGCAATATGATTATGAGACAAGAAAGGAAGATTCAGAAAT
GAGTCTAGTTGAAGGCAGCAATTCAGAGAAGAAGATTCAGTTGTT
ATCATTGCCGTCCTGCTTGGTTTATGGCCTGGTTCAGGACCAAGG
AGAGAAGTGTGAATACATGCCTCTTGAGCTATAGAATGAGACGCT
GGAGTCACTAAGATGATTTTTTAAAAGTATTGTTTTATAAACAAA
AATAAGATTGTGACAAGGGATTCCACTATTAATGTTTTCATGCCT
GTGCCTTAATCTGACTGGGTATGGTGAGAATTGTGCTTGCAGCTT
TAAGGTAAGAATTTTACCATCTTAATATGTTAAGAAGTGCCATTT
CAGTCTCTCATCTCTACTCCAACTTGTCTTCTTAGGTGCTAAAGT
CAGAGCCGAAATCTACGAGGCCTTCGAGAACATCTACCCCATCCT
GAAGGGCTTCAGAAAGACCACC
exemplary 5′ HA for knock-in cassette
insertion at TBP locus
SEQ ID NO: 7
CTGACCACAGCTCTGCAAGCAGACTTCCATTTACAGTGAGGAGGT
GAGCATTGCATTGAACAAAAGATGGCGTTTTCACTTGGAATTAGT
TATCTGAAGCTTTAGGATTCCTCAGCAATATGATTATGAGACAAG
AAAGGAAGATTCAGAAATGAGTCTAGTTGAAGGCAGCAATTCAGA
GAAGAAGATTCAGTTGTTATCATTGCCGTCCTGCTTGGTTTATGG
CCTGGTTCAGGACCAAGGAGAGAAGTGTGAATACATGCCTCTTGA
GCTATAGAATGAGACGCTGGAGTCACTAAGATGATTTTTTAAAAG
TATTGTTTTATAAACAAAAATAAGATTGTGACAAGGGATTCCACT
ATTAATGTTTTCATGCCTGTGCCTTAATCTGACTGGGTATGGTGA
GAATTGTGCTTGCAGCTTTAAGGTAAGAATTTTACCATCTTAATA
TGTTAAGAAGTGCCATTTCAGTCTCTCATCTCTACTCCAACTTGT
CTTCTTAGGGGCTAAAGTGCGGGCCGAGATCTACGAGGCCTTCGA
GAATATCTACCCCATCCTGAAGGGCTTCAGAAAGACCACC
exemplary 5′ HA for knock-in cassette
insertion at TBP locus
SEQ ID NO: 8
ACAAAAGATGGCGTTTTCACTTGGAATTAGTTATCTGAAGCTTTA
GGATTCCTCAGCAATATGATTATGAGACAAGAAAGGAAGATTCAG
AAATGAGTCTAGTTGAAGGCAGCAATTCAGAGAAGAAGATTCAGT
TGTTATCATTGCCGTCCTGCTTGGTTTATGGCCTGGTTCAGGACC
AAGGAGAGAAGTGTGAATACATGCCTCTTGAGCTATAGAATGAGA
CGCTGGAGTCACTAAGATGATTTTTTAAAAGTATTGTTTTATAAA
CAAAAATAAGATTGTGACAAGGGATTCCACTATTAATGTTTTCAT
GCCTGTGCCTTAATCTGACTGGGTATGGTGAGAATTGTGCTTGCA
GCTTTAAGGTAAGAATTTTACCATCTTAATATGTTAAGAAGTGCC
ATTTCAGTCTCTCATCTCTACTCCAACTTGTCTTCTTAGGTGCTA
AAGTCAGAGCAGAAATTTATGAAGCATTCGAGAACATCTACCCTA
TTCTAAAGGGATTCAGGAAGACGACG
exemplary 3′ HA for knock-in cassette
insertion at TBP locus
SEQ ID NO: 9
CAGAAATTTATGAAGCATTTGAAAACATCTACCCTATTCTAAAGG
GATTCAGGAAGACGACGTAATGGCTCTCATGTACCCTTGCCTCCC
CCACCCCCTTCTTTTTTTTTTTTTAAACAAATCAGTTTGTTTTGG
TACCTTTAAATGGTGGTGTTGTGAGAAGATGGATGTTGAGTTGCA
GGGTGTGGCACCAGGTGATGCCCTTCTGTAAGTGCCCACCGCGGG
ATGCCGGGAAGGGGCATTATTTGTGCACTGAGAACACCGCGCAGC
GTGACTGTGAGTTGCTCATACCGTGCTGCTATCTGGGCAGCGCTG
CCCATTTATTTATATGTAGATTTTAAACACTGCTGTTGACAAGTT
GGTTTGAGGGAGAAAACTTTAAGTGTTAAAGCCACCTCTATAATT
GATTGGACTTTTTAATTTTAATGTTTTTCCCCATGAACCACAGTT
TTTATATTTCTACCAGAAAAGTAAAAATCTTTTTTAAAAGTGTTG
TTTTT
exemplary 3′ HA for knock-in cassette
insertion at TBP locus
SEQ ID NO: 10
TAGGTGCTAAAGTCAGAGCAGAAATTTATGAAGCATTTGAAAACA
TCTACCCTATTCTAAAGGGATTCAGGAAGACGACGTAATGGCTCT
CATGTACCCTTGCCTCCCCCACCCCCTTCTTTTTTTTTTTTTAAA
CAAATCAGTTTGTTTTGGTACCTTTAAATGGTGGTGTTGTGAGAA
GATGGATGTTGAGTTGCAGGGTGTGGCACCAGGTGATGCCCTTCT
GTAAGTGCCCACCGCGGGATGCCGGGAAGGGGCATTATTTGTGCA
CTGAGAACACCGCGCAGCGTGACTGTGAGTTGCTCATACCGTGCT
GCTATCTGGGCAGCGCTGCCCATTTATTTATATGTAGATTTTAAA
CACTGCTGTTGACAAGTTGGTTTGAGGGAGAAAACTTTAAGTGTT
AAAGCCACCTCTATAATTGATTGGACTTTTTAATTTTAATGTTTT
TCCCCATGAACCACAGTTTTTATATTTCTACCAGAAAAGTAAAAA
TCTTT
exemplary 3′ HA for knock-in cassette
insertion at TBP locus
SEQ ID NO: 11
AAGGGATTCAGGAAGACGACGTAATGGCTCTCATGTACCCTTGCC
TCCCCCACCCCCTTCTTTTTTTTTTTTTAAACAAATCAGTTTGTT
TTGGTACCTTTAAATGGTGGTGTTGTGAGAAGATGGATGTTGAGT
TGCAGGGTGTGGCACCAGGTGATGCCCTTCTGTAAGTGCCCACCG
CGGGATGCCGGGAAGGGGCATTATTTGTGCACTGAGAACACCGCG
CAGCGTGACTGTGAGTTGCTCATACCGTGCTGCTATCTGGGCAGC
GCTGCCCATTTATTTATATGTAGATTTTAAACACTGCTGTTGACA
AGTTGGTTTGAGGGAGAAAACTTTAAGTGTTAAAGCCACCTCTAT
AATTGATTGGACTTTTTAATTTTAATGTTTTTCCCCATGAACCAC
AGTTTTTATATTTCTACCAGAAAAGTAAAAATCTTTTTTAAAAGT
GTTGTTTTTCTAATTTATAACTCCTAGGGGTTATTTCTGTGCCAG
ACACA

[0401] In some embodiments, a donor template comprises a 5′ and/or 3′ homology arm homologous to a region of a G6PD locus. In some embodiments, a donor template comprises a 5′ homology arm comprising or consisting of the sequence of SEQ ID NO:12. In some embodiments, a 5′ homology arm comprises or consists of a sequence that is at least 85%, 90%, 95%, 98% or 99% identical to the sequence of SEQ ID NO: 12. In some embodiments, a donor template comprises a 3′ homology arm comprising or consisting of the sequence of SEQ ID NO: 13. In certain embodiments, a 3′ homology arm comprises or consists of a sequence that is at least 85%, 90%, 95%, 98% or 99% identical to the sequence of SEQ ID NO: 13.

[0402] In some embodiments, a donor template comprises a 5′ homology arm comprising SEQ ID NO: 12, and a 3′ homology arm comprising SEQ ID NO: 13.

exemplary 5′ HA for knock-in cassette
insertion at G6PD locus
SEQ ID NO: 12
GGCCCGGGGGACTCCACATGGTGGCAGGCAGTGGCATCAGCAAGA
CACTCTCTCCCTCACAGAACGTGAAGCTCCCTGACGCCTATGAGC
GCCTCATCCTGGACGTCTTCTGCGGGAGCCAGATGCACTTCGTGC
GCAGGTGAGGCCCAGCTGCCGGCCCCTGCATACCTGTGGGCTATG
GGGTGGCCTTTGCCCTCCCTCCCTGTGTGCCACCGGCCTCCCAAG
CCATACCATGTCCCCTCAGCGACGAGCTCCGTGAGGCCTGGCGTA
TTTTCACCCCACTGCTGCACCAGATTGAGCTGGAGAAGCCCAAGC
CCATCCCCTATATTTATGGCAGGTGAGGAAAGGGTGGGGGCTGGG
GACAGAGCCCAGCGGGCAGGGGCGGGGTGAGGGTGGAGCTACCTC
ATGCCTCTCCTCCACCCGTCACTCTCCAGCCGAGGCCCCACGGAG
GCAGACGAGCTGATGAAGAGAGTGGGCTTCCAGTACGAGGGAACC
TACAAATGGGTCAACCCTCACAAGCTG
exemplary 3′ HA for knock-in cassette
insertion at G6PD locus
SEQ ID NO: 13
GTGGGTGAACCCCCACAAGCTCTGAGCCCTGGGCACCCACCTCCA
CCCCCGCCACGGCCACCCTCCTTCCCGCCGCCCGACCCCGAGTCG
GGAGGACTCCGGGACCATTGACCTCAGCTGCACATTCCTGGCCCC
GGGCTCTGGCCACCCTGGCCCGCCCCTCGCTGCTGCTACTACCCG
AGCCCAGCTACATTCCTCAGCTGCCAAGCACTCGAGACCATCCTG
GCCCCTCCAGACCCTGCCTGAGCCCAGGAGCTGAGTCACCTCCTC
CACTCACTCCAGCCCAACAGAAGGAAGGAGGAGGGCGCCCATTCG
TCTGTCCCAGAGCTTATTGGCCACTGGGTCTCACTCCTGAGTGGG
GCCAGGGTGGGAGGGAGGGACGAGGGGGAGGAAAGGGGCGAGCAC
CCACGTGAGAGAATCTGCCTGTGGCCTTGCCCGCCAGCCTCAGTG
CCACTTGACATTCCTTGTCACCAGCAACATCTCGAGCCCCCTGGA
TGTCC

[0403] In some embodiments, a donor template comprises a 5′ and/or 3′ homology arm homologous to a region of a E2F4 locus. In some embodiments, a donor template comprises a 5′ homology arm comprising or consisting of the sequence of SEQ ID NO: 14, 15, or 16. In some embodiments, a 5′ homology arm comprises or consists of a sequence that is at least 85%, 90%, 95%, 98% or 99% identical to the sequence of SEQ ID NO: 14, 15, or 16. In some embodiments, a donor template comprises a 3′ homology arm comprising or consisting of the sequence of SEQ ID NO: 17, 18, or 19. In certain embodiments, a 3′ homology arm comprises or consists of a sequence that is at least 85%, 90%, 95%, 98% or 99% identical to the sequence of SEQ ID NO: 17, 18, or 19.

[0404] In some embodiments, a donor template comprises a 5′ homology arm comprising SEQ ID NO: 14, and a 3′ homology arm comprising SEQ ID NO: 17. In some embodiments, a donor template comprises a 5′ homology arm comprising SEQ ID NO: 15, and a 3′ homology arm comprising SEQ ID NO: 18. In some embodiments, a donor template comprises a 5′ homology arm comprising SEQ ID NO: 16, and a 3′ homology arm comprising SEQ ID NO: 19.

exemplary 5′ HA for knock-in cassette
insertion at E2F4 locus
SEQ ID NO: 14
CCAGGGGGCTGTAGTGGGGCCAGGCTGGACCTCTGTGCCCTGAGC
ATGGCTTTCTTGTTTTTCAGTTTTGGAACTCCCCAAAGAGCTGTC
AGAAATCTTTGATCCCACACGAGGTAGGCTGCTGCATTCCTCCCT
GAGGCTAGGGGTAAGGGACACAGCTCATTGGGTCCTATGGCTGTT
TTCTTGCCCTTTTGAGGACCTTGTTGTGGCGCTTATGGTAACTGG
GGCAAAGGGTGAAGTTCCTGATGGGCAGGTGGGGTTCCCTTTCCT
GGGCTTTGGTGGGTGGAGAGGTGGGAGCTGGAATGTTAGTAACTG
AGCTCCCTCCATTCCCAGAGTGCATGAGCTCGGAGCTGCTGGAGG
AGTTGATGTCCTCAGAAGGTGGGTGGCCCTGGAAGGTGGGAGTGG
GTGTGGGCAGGGGTTGGGCTGCTGCTAGGGGAGCCCTGGCCCAGG
GCCTGAGACTAGTGCTCTCTGCAGTGTTCGCCCCTCTGCTGAGAC
TTTCTCCTCCTCCTGGCGACCACGACTACATCTACAACCTGGACG
AGAGCGAGGGCGTGTGCGACCTGTTTGATGTGCCCGTGCTGAACC
TG
exemplary 5′ HA for knock-in cassette
insertion at E2F4 locus
SEQ ID NO: 15
CCAGGCTGGACCTCTGTGCCCTGAGCATGGCTTTCTTGTTTTTCA
GTTTTGGAACTCCCCAAAGAGCTGTCAGAAATCTTTGATCCCACA
CGAGGTAGGCTGCTGCATTCCTCCCTGAGGCTAGGGGTAAGGGAC
ACAGCTCATTGGGTCCTATGGCTGTTTTCTTGCCCTTTTGAGGAC
CTTGTTGTGGCGCTTATGGTAACTGGGGCAAAGGGTGAAGTTCCT
GATGGGCAGGTGGGGTTCCCTTTCCTGGGCTTTGGTGGGTGGAGA
GGTGGGAGCTGGAATGTTAGTAACTGAGCTCCCTCCATTCCCAGA
GTGCATGAGCTCGGAGCTGCTGGAGGAGTTGATGTCCTCAGAAGG
TGGGTGGCCCTGGAAGGTGGGAGTGGGTGTGGGCAGGGGTTGGGC
TGCTGCTAGGGGAGCCCTGGCCCAGGGCCTGAGACTAGTGCTCTC
TGCAGTGTTTGCCCCTCTGCTTCGTCTTAGTCCTCCTCCGGGCGA
CCACGACTACATCTACAACCTGGACGAGAGCGAGGGCGTGTGCGA
CCTGTTTGATGTGCCCGTGCTGAACCTG
exemplary 5′ HA for knock-in cassette
insertion at E2F4 locus
SEQ ID NO: 16
GTCAGAAATCTTTGATCCCACACGAGGTAGGCTGCTGCATTCCTC
CCTGAGGCTAGGGGTAAGGGACACAGCTCATTGGGTCCTATGGCT
GTTTTCTTGCCCTTTTGAGGACCTTGTTGTGGCGCTTATGGTAAC
TGGGGCAAAGGGTGAAGTTCCTGATGGGCAGGTGGGGTTCCCTTT
CCTGGGCTTTGGTGGGTGGAGAGGTGGGAGCTGGAATGTTAGTAA
CTGAGCTCCCTCCATTCCCAGAGTGCATGAGCTCGGAGCTGCTGG
AGGAGTTGATGTCCTCAGAAGGTGGGTGGCCCTGGAAGGTGGGAG
TGGGTGTGGGCAGGGGTTGGGCTGCTGCTAGGGGAGCCCTGGCCC
AGGGCCTGAGACTAGTGCTCTCTGCAGTGTTTGCCCCTCTGCTTC
GTCTTTCTCCACCCCCGGGAGACCACGATTATATCTACAACCTGG
ACGAGAGTGAAGGTGTCTGTGACCTCTTCGACGTGCCCGTGCTCA
ACCTC
exemplary 3′ HA for knock-in cassette
insertion at E2F4 locus
SEQ ID NO: 17
CCACCCCCGGGAGACCACGATTATATCTACAACCTGGACGAGAGT
GAAGGTGTCTGTGACCTCTTTGATGTGCCTGTTCTCAACCTCTGA
CTGACAGGGACATGCCCTGTGTGGCTGGGACCCAGACTGTCTGAC
CTGGGGGTTGCCTGGGGACCTCTCCCACCCGACCCCTACAGAGCT
TGAGAGCCACAGACGCCTGGCTTCTCCGGCCTCCCCTCACCGCAC
AGTTCTGGCCACAGCTCCCGCTCCTGTGCTGGCACTTCTGTGCTC
GCAGAGCAGGGGAACAGGACTCAGCCCCCATCACCGTGGAGCCAA
AGTGTTTGCTTCTCCCTTTCTGCGGCCTTCGCCAGCCCAGGCTCG
GCTGCCACCCAGTGGCACAGAACCGAGGAGCTGCCATTACCCCCC
ATAGGGGGCAGTGTCTTGTTCCTGCCAGCCTCAGTGTCTTGCTTC
TGCCAGCTCCTTCCCCTAGGAGGGAAGGGTGGGGTGGAACTGGGC
ACATG
exemplary 3′ HA for knock-in cassette
insertion at E2F4 locus
SEQ ID NO: 18
ATTATATCTACAACCTGGACGAGAGTGAAGGTGTCTGTGACCTCT
TTGATGTGCCTGTTCTCAACCTCTGACTGACAGGGACATGCCCTG
TGTGGCTGGGACCCAGACTGTCTGACCTGGGGGTTGCCTGGGGAC
CTCTCCCACCCGACCCCTACAGAGCTTGAGAGCCACAGACGCCTG
GCTTCTCCGGCCTCCCCTCACCGCACAGTTCTGGCCACAGCTCCC
GCTCCTGTGCTGGCACTTCTGTGCTCGCAGAGCAGGGGAACAGGA
CTCAGCCCCCATCACCGTGGAGCCAAAGTGTTTGCTTCTCCCTTT
CTGCGGCCTTCGCCAGCCCAGGCTCGGCTGCCACCCAGTGGCACA
GAACCGAGGAGCTGCCATTACCCCCCATAGGGGGCAGTGTCTTGT
TCCTGCCAGCCTCAGTGTCTTGCTTCTGCCAGCTCCTTCCCCTAG
GAGGGAAGGGTGGGGTGGAACTGGGCACATGCCAGCACCACTTCT
AGCTT
exemplary 3′ HA for knock-in cassette
insertion at E2F4 locus
SEQ ID NO: 19
TGACTGACAGGGACATGCCCTGTGTGGCTGGGACCCAGACTGTCT
GACCTGGGGGTTGCCTGGGGACCTCTCCCACCCGACCCCTACAGA
GCTTGAGAGCCACAGACGCCTGGCTTCTCCGGCCTCCCCTCACCG
CACAGTTCTGGCCACAGCTCCCGCTCCTGTGCTGGCACTTCTGTG
CTCGCAGAGCAGGGGAACAGGACTCAGCCCCCATCACCGTGGAGC
CAAAGTGTTTGCTTCTCCCTTTCTGCGGCCTTCGCCAGCCCAGGC
TCGGCTGCCACCCAGTGGCACAGAACCGAGGAGCTGCCATTACCC
CCCATAGGGGGCAGTGTCTTGTTCCTGCCAGCCTCAGTGTCTTGC
TTCTGCCAGCTCCTTCCCCTAGGAGGGAAGGGTGGGGTGGAACTG
GGCACATGCCAGCACCACTTCTAGCTTCCTTCGCTATCCCCCACC
CCCTGACCCTCCAGCTCCTCCTGGCCCTCTCACGTGCCCACTTCT
GCTGG

[0405] In some embodiments, a donor template comprises a 5′ and/or 3′ homology arm homologous to a region of a KIF11 locus. In some embodiments, a donor template comprises a 5′ homology arm comprising or consisting of the sequence of SEQ ID NO: 20, 21, or 22. In some embodiments, a 5′ homology arm comprises or consists of a sequence that is at least 85%, 90%, 95%, 98% or 99% identical to the sequence of SEQ ID NO: 20, 21, or 22. In some embodiments, a donor template comprises a 3′ homology arm comprising or consisting of the sequence of SEQ ID NO: 23, 24, or 25. In certain embodiments, a 3′ homology arm comprises or consists of a sequence that is at least 85%, 90%, 95%, 98% or 99% identical to the sequence of SEQ ID NO: 23, 24, or 25.

[0406] In some embodiments, a donor template comprises a 5′ homology arm comprising SEQ ID NO: 20, and a 3′ homology arm comprising SEQ ID NO: 23. In some embodiments, a donor template comprises a 5′ homology arm comprising SEQ ID NO: 21, and a 3′ homology arm comprising SEQ ID NO: 24. In some embodiments, a donor template comprises a 5′ homology arm comprising SEQ ID NO: 22, and a 3′ homology arm comprising SEQ ID NO: 25.

exemplary 5′ HA for knock-in cassette
insertion at KIF11 locus
SEQ ID NO: 20
AGAGCAGGGTTTCTTGACAGCAGTGCTATTGGCATTTTAAACTGG
ATAATTCTTTGTTGTGATGGGCTTTCCTGTGGACTGTACTATGTT
GGTACACAAGAAAAACAGTGTACTATGTGAATACTCACTCAAAGC
CAGTAGCACTCCCTGATTGTAACACCAAAAAAGTCTCTCAGCATT
GCCAAATGTCCCCTGTGGCAGCAGAATCACTCCCTGATGAGAACC
ACTACCCTGGAGTAAAATCTATAACTATGTCTTAGAAAATAACAC
AGAAAATTAATATTTCTTTCACTCTACTCCTTCCATTAGTGATCA
AATAAAGAAGGCATTTGGCGCTACTTGCCAAATTGTTGGCTCAAA
CTTGTGCTGAACCTTTTTTGGTTTTCTACACTTAAGTTTTTTTGC
CTATAACCCAGAGAACTTTGAAAATAGAGTGTAGTTAATGTGTAT
CTAATGTTACTTTGTATTGACTTAATTTACCGGCCTTTAATCCAC
AGCATAAGAAGTCCCACGGCAAGGACAAAGAGAACCGGGGCATCA
ACACACTGGAACGGTCCAAGGTCGAGGAAACAACCGAGCACCTGG
TCACCAAGAGCAGACTGCCTCTGAGAGCCCAGATCAACCTG
exemplary 5′ HA for knock-in cassette
insertion at KIF11 locus
SEQ ID NO: 21
TTCCTGTGGACTGTACTATGTTGGTACACAAGAAAAACAGTGTAC
TATGTGAATACTCACTCAAAGCCAGTAGCACTCCCTGATTGTAAC
ACCAAAAAAGTCTCTCAGCATTGCCAAATGTCCCCTGTGGCAGCA
GAATCACTCCCTGATGAGAACCACTACCCTGGAGTAAAATCTATA
ACTATGTCTTAGAAAATAACACAGAAAATTAATATTTCTTTCACT
CTACTCCTTCCATTAGTGATCAAATAAAGAAGGCATTTGGCGCTA
CTTGCCAAATTGTTGGCTCAAACTTGTGCTGAACCTTTTTTGGTT
TTCTACACTTAAGTTTTTTTGCCTATAACCCAGAGAACTTTGAAA
ATAGAGTGTAGTTAATGTGTATCTAATGTTACTTTGTATTGACTT
AATTTTCCCGCCTTAAATCCACAGCATAAAAAATCACATGGAAAA
GACAAAGAAAACAGAGGCATTAACACACTGGAGAGGTCTAAAGTG
GAAGAAACAACCGAGCACCTGGTCACCAAGAGCAGACTGCCTCTG
AGAGCCCAGATCAACCTG
exemplary 5′ HA for knock-in cassette
insertion at KIF11 locus
SEQ ID NO: 22
TTAAACTGGATAATTCTTTGTTGTGATGGGCTTTCCTGTGGACTG
TACTATGTTGGTACACAAGAAAAACAGTGTACTATGTGAATACTC
ACTCAAAGCCAGTAGCACTCCCTGATTGTAACACCAAAAAAGTCT
CTCAGCATTGCCAAATGTCCCCTGTGGCAGCAGAATCACTCCCTG
ATGAGAACCACTACCCTGGAGTAAAATCTATAACTATGTCTTAGA
AAATAACACAGAAAATTAATATTTCTTTCACTCTACTCCTTCCAT
TAGTGATCAAATAAAGAAGGCATTTGGCGCTACTTGCCAAATTGT
TGGCTCAAACTTGTGCTGAACCTTTTTTGGTTTTCTACACTTAAG
TTTTTTTGCCTATAACCCAGAGAACTTTGAAAATAGAGTGTAGTT
AATGTGTATCTAATGTTACTTTGTATTGACTTAATTTTCCCGCCT
TAAATCCACAGCATAAAAAATCACATGGAAAAGACAAAGAAAACA
GAGGCATCAACACACTGGAACGGTCCAAGGTCGAGGAAACAACCG
AGCACCTGGTCACCAAGAGCAGACTGCCTCTGAGAGCCCAGATCA
ACCTG
exemplary 3′ HA for knock-in cassette
insertion at KIF11 locus
SEQ ID NO: 23
AAAAAATCACATGGAAAAGACAAAGAAAACAGAGGCATTAACACA
CTGGAGAGGTCTAAAGTGGAAGAAACTACAGAGCACTTGGTTACA
AAGAGCAGATTACCTCTGCGAGCCCAGATCAACCTTTAATTCACT
TGGGGGTTGGCAATTTTATTTTTAAAGAAAACTTAAAAATAAAAC
CTGAAACCCCAGAACTTGAGCCTTGTGTATAGATTTTAAAAGAAT
ATATATATCAGCCGGGCGCGGTGGCTCATGCCTGTAATCCCAGCA
CTTTGGGAGGCTGAGGCGGGTGGATTGCTTGAGCCCAGGAGTTTG
AGACCAGCCTGGCCAACGTGGCAAAACCTCGTCTCTGTTAAAAAT
TAGCCGGGCGTGGTGGCACACTCCTGTAATCCCAGCTACTGGGGA
GGCTGAGGCACGAGAATCACTTGAACCCAGGAAGCGGGGTTGCAG
TGAGCCAAAGGTACACCACTACACTCCAGCCTGGGCAACAGAGCA
AGACT
exemplary 3′ HA for knock-in cassette
insertion at KIF11 locus
SEQ ID NO: 24
AACTACAGAGCACTTGGCTACATAGAGCAGATTACCTCTGCGAGC
CCAGATCAACCTTTAATTCACTTGGGGGTTGGCAATTTTATTTTT
AAAGAAAACTTAAAAATAAAACCTGAAACCCCAGAACTTGAGCCT
TGTGTATAGATTTTAAAAGAATATATATATCAGCCGGGCGCGGTG
GCTCATGCCTGTAATCCCAGCACTTTGGGAGGCTGAGGCGGGTGG
ATTGCTTGAGCCCAGGAGTTTGAGACCAGCCTGGCCAACGTGGCA
AAACCTCGTCTCTGTTAAAAATTAGCCGGGCGTGGTGGCACACTC
CTGTAATCCCAGCTACTGGGGAGGCTGAGGCACGAGAATCACTTG
AACCCAGGAAGCGGGGTTGCAGTGAGCCAAAGGTACACCACTACA
CTCCAGCCTGGGCAACAGAGCAAGACTCGGTCTCAAAAACAAAAT
TTAAAAAAGATATAAGGCAGTACTGTAAATTCAGTTGAATTTTGA
TATCT
exemplary 3′ HA for knock-in cassette
insertion at KIF11 locus
SEQ ID NO: 25
ATTAACACACTGGAGAGTTCTGAAGTGGAAGAAACTACAGAGCAC
TTGGTTACAAAGAGCAGATTACCTCTGCGAGCCCAGATCAACCTT
TAATTCACTTGGGGGTTGGCAATTTTATTTTTAAAGAAAACTTAA
AAATAAAACCTGAAACCCCAGAACTTGAGCCTTGTGTATAGATTT
TAAAAGAATATATATATCAGCCGGGCGCGGTGGCTCATGCCTGTA
ATCCCAGCACTTTGGGAGGCTGAGGCGGGTGGATTGCTTGAGCCC
AGGAGTTTGAGACCAGCCTGGCCAACGTGGCAAAACCTCGTCTCT
GTTAAAAATTAGCCGGGCGTGGTGGCACACTCCTGTAATCCCAGC
TACTGGGGAGGCTGAGGCACGAGAATCACTTGAACCCAGGAAGCG
GGGTTGCAGTGAGCCAAAGGTACACCACTACACTCCAGCCTGGGC
AACAGAGCAAGACTCGGTCTCAAAAACAAAATTTAAAAAAGATAT
AAGGC

### Inverted Terminal Repeats (ITRs)

[0407] In certain embodiments, a donor template comprises an AAV derived sequence. In certain embodiments, a donor template comprises AAV derived sequences that are typical of an AAV construct, such as cis-acting 5′ and 3′ inverted terminal repeats (ITRs) (See, e.g., B. J. Carter, in “Handbook of Parvoviruses”, ed., P. Tijsser, CRC Press, pp. 155 168 (1990), which is incorporated in its entirety herein by reference). Generally, ITRs are able to form a hairpin. The ability to form a hairpin can contribute to an ITRs ability to self-prime, allowing primase-independent synthesis of a second DNA strand. ITRs also play a role in integration of AAV construct (e.g., a coding sequence) into a genome of a target cell. ITRs can also aid in efficient encapsidation of an AAV construct in an AAV particle.

[0408] In some embodiments, a donor template described herein is included within an rAAV particle (e.g., an AAV6 particle). In some embodiments, an ITR is or comprises about 145 nucleic acids. In some embodiments, all or substantially all of a sequence encoding an ITR is used. In some embodiments, an AAV ITR sequence may be obtained from any known AAV, including presently identified mammalian AAV types. In some embodiments an ITR is an AAV6 ITR.

[0409] An example of an AAV construct employed in the present disclosure is a “cis-acting” construct containing a cargo sequence (e.g., a donor template described herein), in which the donor template is flanked by 5′ or “left” and 3′ or “right” AAV ITR sequences. 5′ and left designations refer to a position of an ITR sequence relative to an entire construct, read left to right, in a sense direction. For example, in some embodiments, a 5′ or left ITR is an ITR that is closest to a target loci promoter (as opposed to a polyadenylation sequence) for a given construct, when a construct is depicted in a sense orientation, linearly. Concurrently, 3′ and right designations refer to a position of an ITR sequence relative to an entire construct, read left to right, in a sense direction. For example, in some embodiments, a 3′ or right ITR is an ITR that is closest to a polyadenylation sequence in a target loci (as opposed to a promoter sequence) for a given construct, when a construct is depicted in a sense orientation, linearly. ITRs as provided herein are depicted in 5′ to 3′ order in accordance with a sense strand. Accordingly, one of skill in the art will appreciate that a 5′ or “left” orientation ITR can also be depicted as a 3′ or “right” ITR when converting from sense to antisense direction. Further, it is well within the ability of one of skill in the art to transform a given sense ITR sequence (e.g., a 5′/left AAV ITR) into an antisense sequence (e.g., 3′/right ITR sequence). One of ordinary skill in the art would understand how to modify a given ITR sequence for use as either a 5′/left or 3′/right ITR, or an antisense version thereof.

[0410] For example, in some embodiments an ITR (e.g., a 5′ ITR) can have a sequence according to SEQ ID NO: 158. In some embodiments, an ITR (e.g., a 3′ ITR) can have a sequence according to SEQ ID NO: 159. In some embodiments, an ITR includes one or more modifications, e.g., truncations, deletions, substitutions or insertions, as is known in the art. In some embodiments, an ITR comprises fewer than 145 nucleotides, e.g., 127, 130, 134 or 141 nucleotides. For example, in some embodiments, an ITR comprises 110, 111, 112, 113, 114, 115, 116, 117, 118, 119, 120, 121, 122, 123, 124, 125, 126, 127, 128, 129, 130, 131, 132, 133, 134, 135, 136, 137, 138, 139, 140, 141, 142, 143 144, or 145 nucleotides.

[0411] A non-limiting example of 5′ AAV ITR sequences includes SEQ ID NO: 158. A non-limiting example of 3′ AAV ITR sequences includes SEQ ID NO: 159. In some embodiments, the 5′ and a 3′ AAV ITRs (e.g., SEQ ID NO: 158 and 159) flank a donor template described herein (e.g., a donor template comprising a 5′HA, a knock-in cassette, and a 3′ HA). The ability to modify ITR sequences is within the skill of the art. (See, e.g., texts such as Sambrook et al. “Molecular Cloning. A Laboratory Manual”, 2d ed., Cold Spring Harbor Laboratory, New York (1989); and K. Fisher et al., J Virol., 70:520 532 (1996), each of which is incorporated in its entirety herein by reference). In some embodiments, a 5′ ITR sequence is at least 85%, 90%, 95%, 98% or 99% identical to a 5′ ITR sequence represented by SEQ ID NO: 158. In some embodiments, a 3′ ITR sequence is at least 85%, 90%, 95%, 98% or 99% identical to a 3′ ITR sequence represented by SEQ ID NO: 159.

exemplary 5′ ITR for knock-in cassette
insertion
SEQ ID NO: 158
CCTGCAGGCAGCTGCGCGCTCGCTCGCTCACTGAGGCCGCCCGGG
CAAAGCCCGGGCGTCGGGCGACCTTTGGTCGCCCGGCCTCAGTGA
GCGAGCGAGCGCGCAGAGAGGGAGTGGCCAACTCCATCACTAGGG
GTTCCT
exemplary 3′ ITR for knock-in cassette
insertion
SEQ ID NO: 159
AGGAACCCCTAGTGATGGAGTTGGCCACTCCCTCTCTGCGCGCTC
GCTCGCTCACTGAGGCCGGGCGACCAAAGGTCGCCCGACGCCCGG
GCTTTGCCCGGGCGGCCTCAGTGAGCGAGCGAGCGCGCAGCTGCC
TGCAGG

### Flanking Untranslated Regions, 5′ UTRs and 3′ UTRs

[0412] In some embodiments, a knock-in cassette described herein includes all or a portion of an untranslated region (UTR), such as a 5′ UTR and/or a 3′ UTR. UTRs of a gene are transcribed but not translated. A 5′ UTR starts at a transcription start site and continues to the start codon but does not include the start codon. A 3′ UTR starts immediately following the stop codon and continues until the transcriptional termination signal. The regulatory and/or control features of a UTR can be incorporated into any of the knock-in cassettes described herein to enhance or otherwise modulate the expression of an essential target gene loci and/or a cargo sequence.

[0413] Natural 5′ UTRs include a sequence that plays a role in translation initiation. In some embodiments, a 5′ UTR comprises sequences, like Kozak sequences, which are commonly known to be involved in the process by which the ribosome initiates translation of many genes. Kozak sequences have the consensus sequence CCR(A/G)CCAUGG, where R is a purine (A or G) three bases upstream of the start codon (AUG), and the start codon is followed by another “G”. The 5′ UTRs have also been known to form secondary structures that are involved in elongation factor binding. Non-limiting examples of 5′ UTRs include those from the following genes: albumin, serum amyloid A, Apolipoprotein A/B/E, transferrin, alpha fetoprotein, erythropoietin, and Factor VIII.

[0414] In some embodiments, a UTR may comprise a non-endogenous regulatory region. In some embodiments, a UTR that comprises a non-endogenous regulatory region is a 3′ UTR. In some embodiments, a UTR that comprises a non-endogenous regulatory region is a 5′ UTR. In some embodiments, a non-endogenous regulatory region may be a target of at least one inhibitory nucleic acid. In some embodiments, an inhibitory nucleic acid inhibits expression and/or activity of a target gene. In some embodiments, an inhibitory nucleic acid is a short interfering RNA (siRNA), a short hairpin RNA (shRNA), a microRNA (miRNA), an antisense oligonucleotide, a guide RNA (gRNA), or a ribozyme. In some embodiments, an inhibitory nucleic acid is an endogenous molecule. In some embodiments, an inhibitory nucleic acid is a non-endogenous molecule. In some embodiments, an inhibitory nucleic acid displays a tissue specific expression pattern. In some embodiments, an inhibitory nucleic acid displays a cell specific expression pattern.

[0415] In some embodiments, a knock-in cassette may comprise more than one non-endogenous regulatory regions, e.g., two, three, four, five, six, seven, eight, nine, or ten regulatory regions. In some embodiments, a knock-in cassette may comprise four non-endogenous regulatory regions. In some embodiments, a construct may comprise more than one non-endogenous regulatory regions, wherein at least one of the more than one non-endogenous regulatory regions are not the same as at least one of the other non-endogenous regulatory regions.

[0416] In some embodiments, a 3′ UTR is found immediately 3′ to the stop codon of a gene of interest. In some embodiments, a 3′ UTR from an mRNA that is transcribed by a target cell can be included in any knock-in cassette described herein. In some embodiments, a 3′ UTR is derived from an endogenous target loci and may include all or part of the endogenous sequence. In some embodiments, a 3′ UTR sequence is at least 85%, 90%, 95% or 98% identical to the sequence of SEQ ID NO: 26.

exemplary 3′ UTR for knock-in cassette insertion
SEQ ID NO: 26
GCGGCCGCGTCGAGTCTAGAGGGCCCGTTTAAACCCGCTGATCAGCCTCGA

### Polyadenylation Sequences

[0417] In some embodiments, a knock-in cassette construct provided herein can include a polyadenylation (poly(A)) signal sequence. Most nascent eukaryotic mRNAs possess a poly(A) tail at their 3′ end, which is added during a complex process that includes cleavage of the primary transcript and a coupled polyadenylation reaction driven by the poly(A) signal sequence (see, e.g., Proudfoot et al., Cell 108:501-512, 2002, which is incorporated herein by reference in its entirety). A poly(A) tail confers mRNA stability and transferability (Molecular Biology of the Cell, Third Edition by B. Alberts et al., Garland Publishing, 1994, which is incorporated herein by reference in its entirety). In some embodiments, a poly(A) signal sequence is positioned 3′ to a coding sequence.

[0418] As used herein, “polyadenylation” refers to the covalent linkage of a polyadenylyl moiety, or its modified variant, to a messenger RNA molecule. In eukaryotic organisms, most messenger RNA (mRNA) molecules are polyadenylated at the 3′ end. A 3′ poly(A) tail is a long sequence of adenine nucleotides (e.g., 50, 60, 70, 100, 200, 500, 1000, 2000, 3000, 4000, or 5000) added to the pre-mRNA through the action of an enzyme, polyadenylate polymerase. In some embodiments, a poly(A) tail is added onto transcripts that contain a specific sequence, e.g., a polyadenylation (or poly(A)) signal. A poly(A) tail and associated proteins aid in protecting mRNA from degradation by exonucleases. Polyadenylation also plays a role in transcription termination, export of the mRNA from the nucleus, and translation. Polyadenylation typically occurs in the nucleus immediately after transcription of DNA into RNA, but also can occur later in the cytoplasm. After transcription has been terminated, an mRNA chain is cleaved through the action of an endonuclease complex associated with RNA polymerase. A cleavage site is usually characterized by the presence of the base sequence AAUAAA near the cleavage site. After the mRNA has been cleaved, adenosine residues are added to the free 3′ end at the cleavage site.

[0419] As used herein, a “poly(A) signal sequence” or “polyadenylation signal sequence” is a sequence that triggers the endonuclease cleavage of an mRNA and the addition of a series of adenosines to the 3′ end of the cleaved mRNA.

[0420] There are several poly(A) signal sequences that can be used, including those derived from bovine growth hormone (bGH) (Woychik et al., Proc. Natl. Acad. Sci. U.S.A. 81(13):3944-3948, 1984; U.S. Pat. No. 5,122,458, each of which is incorporated herein by reference in its entirety), mouse-β-globin, mouse-α-globin (Orkin et al., EMBO J 4(2):453-456, 1985; Thein et al., Blood 71(2):313-319, 1988, each of which is incorporated herein by reference in its entirety), human collagen, polyoma virus (Batt et al., Mol. Cell Biol. 15(9):4783-4790, 1995, which is incorporated herein by reference in its entirety), the Herpes simplex virus thymidine kinase gene (HSV TK), IgG heavy-chain gene polyadenylation signal (US 2006/0040354, which is incorporated herein by reference in its entirety), human growth hormone (hGH) (Szymanski et al., Mol. Therapy 15(7):1340-1347, 2007, which is incorporated herein by reference in its entirety), the group comprising a SV40 poly(A) site, such as the SV40 late and early poly(A) site (Schek et al., Mol. Cell Biol. 12(12):5386-5393, 1992, which is incorporated herein by reference in its entirety).

[0421] The poly(A) signal sequence can be AATAAA. The AATAAA sequence may be substituted with other hexanucleotide sequences with homology to AATAAA and that are capable of signaling polyadenylation, including ATTAAA, AGTAAA, CATAAA, TATAAA, GATAAA, ACTAAA, AATATA, AAGAAA, AATAAT, AAAAAA, AATGAA, AATCAA, AACAAA, AATCAA, AATAAC, AATAGA, AATTAA, or AATAAG (see, e.g., WO 06/12414, which is incorporated herein by reference in its entirety).

[0422] In some embodiments, a poly(A) signal sequence can be a synthetic polyadenylation site (see, e.g., the pCI-neo expression construct of Promega that is based on Levitt et al., Genes Dev. 3(7):1019-1025, 1989, which is incorporated herein by reference in its entirety). In some embodiments, a poly(A) signal sequence is the polyadenylation signal of soluble neuropilin-1 (sNRP) (AAATAAAATACGAAATG) (see, e.g., WO 05/073384, which is incorporated herein by reference in its entirety). In some embodiments, a poly(A) signal sequence comprises or consists of the SV40 poly(A) site. In some embodiments, a poly(A) signal sequence comprises or consists of SEQ ID NO: 27. In some embodiments, a poly(A) signal sequence comprises or consists of bGHpA. In some embodiments, a poly(A) signal sequence comprises or consists of SEQ ID NO: 28. Additional examples of poly(A) signal sequences are known in the art. In some embodiments, a poly(A) sequence is at least 85%, 90%, 95%, 98% or 99% identical to the sequence of SEQ ID NOs: 27 or 28.

exemplary SV40 poly(A) signal sequence
SEQ ID NO: 27
AACTTGTTTATTGCAGCTTATAATGGTTACAAATAAAGCAATAGCATCA
CAAATTTCACAAATAAAGCATTTTTTTCACTGCATTCTAGTTGTGGTTT
GTCCAAACTCATCAATGTATCTTA
exemplary bGH poly(A) signal sequence
SEQ ID NO: 28
CTGTGCCTTCTAGTTGCCAGCCATCTGTTGTTTGCCCCTCCCCCGTGCC
TTCCTTGACCCTGGAAGGTGCCACTCCCACTGTCCTTTCCTAATAAAAT
GAGGAAATTGCATCGCATTGTCTGAGTAGGTGTCATTCTATTCTGGGGG
GTGGGGTGGGGCAGGACAGCAAGGGGGAGGATTGGGAAGACAATAGCAG
GCATGCTGGGGATGCGGTGGGCTCTATGG

### IRES and 2A Elements

[0423] In some embodiments, the knock-in cassette comprises a regulatory element that enables expression of the gene product encoded by the essential gene and the gene product of interest as separate gene products, e.g., an IRES or 2A element located between the exogenous coding sequence or partial coding sequence of the essential gene and the exogenous coding sequence for the gene product of interest.

[0424] In some embodiments, a knock-in cassette may comprise multiple gene products of interest (e.g., at least two gene products of interest). In some embodiments, gene products of interest may be separated by a regulatory element that enables expression of the at least two gene products of interest as more than one gene product, e.g., an IRES or 2A element located between the at least two coding sequences, facilitating creation of at least two peptide products.

[0425] Internal Ribosome Entry Site (IRES) elements are one type of regulatory element that are commonly used for this purpose. As is well known in the art, IRES elements allow for initiation of translation from an internal region of the mRNA and hence expression of two separate proteins from the same mRNA transcript. IRES was originally discovered in poliovirus RNA, where it promotes translation of the viral genome in eukaryotic cells. Since then, a variety of IRES sequences have been discovered—many from viruses, but also some from cellular mRNAs, e.g., see Mokrejs et al., Nucleic Acids Res. 2006; 34(Database issue):D125-D130.

[0426] 2A elements are another type of regulatory element that are commonly used for this purpose. These 2A elements encode so-called “self-cleaving” 2A peptides which are short peptides (about 20 amino acids) that were first discovered in picornaviruses. The term “self-cleaving” is not entirely accurate, as these peptides are thought to function by making the ribosome skip the synthesis of a peptide bond at the C-terminus of a 2A element, leading to separation between the end of the 2A sequence and the next peptide downstream. The “cleavage” occurs between the Glycine (G) and Proline (P) residues found on the C-terminus meaning the upstream cistron, i.e., protein encoded by the essential gene will have a few additional residues from the 2A peptide added to the end, while the downstream cistron, i.e., gene product of interest will start with the Proline (P).

[0427] Table 2 below lists the four commonly used 2A peptides (an optional GSG sequence is sometimes added to the N-terminal end of the peptide to improve cleavage efficiency). There are many potential 2A peptides that may be suitable for methods and compositions described herein (see e.g., Luke et al., Occurrence, function and evolutionary origins of ‘2A-like’ sequences in virus genomes. J Gen Virol. 2008). Those skilled in the art know that the choice of specific 2A peptide for a particular knock-in cassette will ultimately depend on a number of factors such as cell type or experimental conditions. Those skilled in the art will recognize that nucleotide sequences encoding specific 2A peptides can vary while still encoding a peptide suitable for inducing a desired cleavage event.

TABLE 2
Exemplary IRES and 2A peptide and nucleic acid sequences

| SEQ ID NO: | 2A peptide | Amino acid sequence |
|---|---|---|
| 29 | T2A | EGRGSLLTCGDVEENPGP |
| 30 | P2A | ATNFSLLKQAGDVEENPGP |
| 31 | E2A | QCTNYALLKLAGDVESNPGP |
| 32 | F2A | VKQTLNFDLLKLAGDVESNPGP |
| 33 | T2A | GAGGGCAGAGGAAGTCTTCTAACATGCGGTGACGTGGAGGAGA |
| | | ATCCTGGCCCG |
| 34 | P2A | GGAAGCGGAGCTACTAACTTCAGCCTGCTGAAGCAGGCTGGAG |
| | | ACGTGGAGGAGAACCCTGGACCT |
| 35 | E2A | CAGTGTACTAATTATGCTCTCTTGAAATTGGCTGGAGATGTTG |
| | | AGAGCAACCCTGGACCT |
| 36 | F2A | GTGAAACAGACTTTGAATTTTGACCTTCTCAAGTTGGCGGGAG |
| | | ACGTGGAGTCCAACCCTGGACCT |
| 37 | IRES | CCCCTCTCCCTCCCCCCCCCCTAACGTTACTGGCCGAAGCCGC |
| | | TTGGAATAAGGCCGGTGTGCGTTTGTCTATATGTTATTTTCCA |
| | | CCATATTGCCGTCTTTTGGCAATGTGAGGGCCCGGAAACCTGG |
| | | CCCTGTCTTCTTGACGAGCATTCCTAGGGGTCTTTCCCCTCTC |
| | | GCCAAAGGAATGCAAGGTCTGTTGAATGTCGTGAAGGAAGCAG |
| | | TTCCTCTGGAAGCTTCTTGAAGACAAACAACGTCTGTAGCGAC |
| | | CCTTTGCAGGCAGCGGAACCCCCCACCTGGCGACAGGTGCCTC |
| | | TGCGGCCAAAAGCCACGTGTATAAGATACACCTGCAAAGGCGG |
| | | CACAACCCCAGTGCCACGTTGTGAGTTGGATAGTTGTGGAAAG |
| | | AGTCAAATGGCTCTCCTCAAGCGTATTCAACAAGGGGCTGAAG |
| | | GATGCCCAGAAGGTACCCCATTGTATGGGATCTGATCTGGGGC |
| | | CTCGGTGCACATGCTTTACATGTGTTTAGTCGAGGTTAAAAAA |
| | | ACGTCTAGGCCCCCCGAACCACGGGGACGTGGTTTTCCTTTGA |
| | | AAAACACGATGATAA |

### Essential Genes

[0428] An essential gene can be any gene that is essential for the survival and/or the proliferation of the cell. In some embodiments, an essential gene is a housekeeping gene that is essential for survival of all cell types, e.g., a gene listed in Table 3. See also other housekeeping genes discussed in Eisenberg, Trends in Gen. 2014; 30(3):119-20 and Moein et al., Adv. Biomed Res. 2017; 6:15. Additional genes that are essential for various cell types, including iPSCs/ESCs, are listed in Table 4 (see also the essential genes discussed in Yilmaz et al., Nat. Cell Biol. 2018; 20:610-619 the entire contents of which are incorporated herein by reference).

[0429] In some embodiments the essential gene is GAPDH and the DNA nuclease causes a break in exon 9, e.g., a double-strand break. In some embodiments the essential gene is TBP and the DNA nuclease causes a break in exon 7, or exon 8, e.g., a double-strand break. In some embodiments the essential gene is E2F4 and the DNA nuclease causes a break in exon 10, e.g., a double-strand break. In some embodiments the essential gene is G6PD and the DNA nuclease causes a break in exon 13, e.g., a double-strand break. In some embodiments the essential gene is KIF11 and the DNA nuclease causes a break in exon 22, e.g., a double-strand break.

TABLE 3
Exemplary housekeeping genes

| Ensembl ID | Gene Symbol |
|---|---|
| ENSG00000075624 | ACTB |
| ENSG00000116459 | ATP5F1 |
| ENSG00000166710 | B2M |
| ENSG00000111640 | GAPDH |
| ENSG00000169919 | GUSB |
| ENSG00000165704 | HPRT1 |
| ENSG00000102144 | PGK1 |
| ENSG00000196262 | PPIA |
| ENSG00000138160 | KIF11 |
| ENSG00000231500 | RPS18 |
| ENSG00000112592 | TBP |
| ENSG00000072274 | TFRC |
| ENSG00000164924 | YWHAZ |
| ENSG00000089157 | RPLP0 |
| ENSG00000142541 | RPL13A |
| ENSG00000147604 | RPL7 |
| ENSG00000205250 | E2F4 |
| ENSG00000160211 | G6PD |

TABLE 4
Additional exemplary essential genes

| Ensembl ID | Gene Symbol |
|---|---|
| ENSG00000111704 | NANOG |
| ENSG00000179059 | ZFP42 |
| ENSG00000136826 | KLF4 |
| ENSG00000118655 | DCLRE1B |
| ENSG00000172409 | CLP1 |
| ENSG00000082898 | XPO1 |
| ENSG00000114867 | EIF4G1 |
| ENSG00000115866 | DARS |
| ENSG00000204628 | GNB2L1 |
| ENSG00000198242 | RPL23A |
| ENSG00000158526 | TSR2 |
| ENSG00000125450 | NUP85 |
| ENSG00000134371 | CDC73 |
| ENSG00000164941 | INTS8 |
| ENSG00000055783 | USP36 |
| ENSG00000258366 | RTEL1 |
| ENSG00000188846 | RPL14 |
| ENSG00000247626 | MARS2 |
| ENSG00000095787 | WAC |
| ENSG00000108094 | CUL2 |
| ENSG00000185946 | RNPC3 |
| ENSG00000154473 | BUB3 |
| ENSG00000204394 | VARS |
| ENSG00000103051 | COG4 |
| ENSG00000104738 | MCM4 |
| ENSG00000117222 | RBBP5 |
| ENSG00000082516 | GEMIN5 |
| ENSG00000100162 | CENPM |
| ENSG00000141456 | PELP1 |
| ENSG00000137807 | KIF23 |
| ENSG00000112685 | EXOC2 |
| ENSG00000125995 | ROMO1 |
| ENSG00000136891 | TEX10 |
| ENSG00000173113 | TRMT112 |
| ENSG00000075914 | EXOSC7 |
| ENSG00000119523 | ALG2 |
| ENSG00000244038 | DDOST |
| ENSG00000108175 | ZMIZ1 |
| ENSG00000129691 | ASH2L |
| ENSG00000183207 | RUVBL2 |
| ENSG00000055044 | NOP58 |
| ENSG00000204315 | FKBPL |
| ENSG00000187522 | HSPA14 |
| ENSG00000169375 | SIN3A |
| ENSG00000143748 | NVL |
| ENSG00000021776 | AQR |
| ENSG00000132467 | UTP3 |
| ENSG00000087470 | DNM1L |
| ENSG00000130811 | EIF3G |
| ENSG00000180198 | RCC1 |
| ENSG00000101407 | TTI1 |
| ENSG00000116455 | WDR77 |
| ENSG00000135763 | URB2 |
| ENSG00000133316 | WDR74 |
| ENSG00000189091 | SF3B3 |
| ENSG00000109917 | ZNF259 |
| ENSG00000130640 | TUBGCP2 |
| ENSG00000011376 | LARS2 |
| ENSG00000135249 | RINT1 |
| ENSG00000126883 | NUP214 |
| ENSG00000163510 | CWC22 |
| ENSG00000101138 | CSTF1 |
| ENSG00000104221 | BRF2 |
| ENSG00000125630 | POLR1B |
| ENSG00000083896 | YTHDC1 |
| ENSG00000105726 | ATP13A1 |
| ENSG00000105618 | PRPF31 |
| ENSG00000117748 | RPA2 |
| ENSG00000143294 | PRCC |
| ENSG00000156239 | N6AMT1 |
| ENSG00000143384 | MCL1 |
| ENSG00000113407 | TARS |
| ENSG00000086589 | RBM22 |
| ENSG00000133119 | RFC3 |
| ENSG00000052749 | RRP12 |
| ENSG00000103047 | TANGO6 |
| ENSG00000142751 | GPN2 |
| ENSG00000101057 | MYBL2 |
| ENSG00000176915 | ANKLE2 |
| ENSG00000071127 | WDR1 |
| ENSG00000106344 | RBM28 |
| ENSG00000100316 | RPL3 |
| ENSG00000139131 | YARS2 |
| ENSG00000182831 | C16orf72 |
| ENSG00000167325 | RRM1 |
| ENSG00000172262 | ZNF131 |
| ENSG00000007168 | PAFAH1B1 |
| ENSG00000117174 | ZNHIT6 |
| ENSG00000196497 | IPO4 |
| ENSG00000188566 | NDOR1 |
| ENSG00000183091 | NEB |
| ENSG00000011304 | PTBP1 |
| ENSG00000109805 | NCAPG |
| ENSG00000123154 | WDR83 |
| ENSG00000147416 | ATP6V1B2 |
| ENSG00000163961 | RNF168 |
| ENSG00000163811 | WDR43 |
| ENSG00000143624 | INTS3 |
| ENSG00000101161 | PRPF6 |
| ENSG00000130726 | TRIM28 |
| ENSG00000165494 | PCF11 |
| ENSG00000053900 | ANAPC4 |
| ENSG00000168255 | POLR2J3 |
| ENSG00000129534 | MIS18BP1 |
| ENSG00000164754 | RAD21 |
| ENSG00000120158 | RCL1 |
| ENSG00000161016 | RPL8 |
| ENSG00000030066 | NUP160 |
| ENSG00000099624 | ATP5D |
| ENSG00000116120 | FARSB |
| ENSG00000115233 | PSMD14 |
| ENSG00000086504 | MRPL28 |
| ENSG00000160752 | FDPS |
| ENSG00000049541 | RFC2 |
| ENSG00000148688 | RPP30 |
| ENSG00000114573 | ATP6V1A |
| ENSG00000086200 | IPO11 |
| ENSG00000119720 | NRDE2 |
| ENSG00000058262 | SEC61A1 |
| ENSG00000073111 | MCM2 |
| ENSG00000138160 | KIF11 |
| ENSG00000215193 | PEX26 |
| ENSG00000161057 | PSMC2 |
| ENSG00000187514 | PTMA |
| ENSG00000135829 | DHX9 |
| ENSG00000058729 | RIOK2 |
| ENSG00000110330 | BIRC2 |
| ENSG00000141759 | TXNL4A |
| ENSG00000166986 | MARS |
| ENSG00000153774 | CFDP1 |
| ENSG00000130177 | CDC16 |
| ENSG00000241553 | ARPC4 |
| ENSG00000132604 | TERF2 |
| ENSG00000114982 | KANSL3 |
| ENSG00000213780 | GTF2H4 |
| ENSG00000139343 | SNRPF |
| ENSG00000101189 | MRGBP |
| ENSG00000079246 | XRCC5 |
| ENSG00000196943 | NOP9 |
| ENSG00000122965 | RBM19 |
| ENSG00000132383 | RPA1 |
| ENSG00000094880 | CDC23 |
| ENSG00000213639 | PPP1CB |
| ENSG00000109911 | ELP4 |
| ENSG00000180957 | PITPNB |
| ENSG00000122257 | RBBP6 |
| ENSG00000173145 | NOC3L |
| ENSG00000179115 | FARSA |
| ENSG00000105171 | POP4 |
| ENSG00000148303 | RPL7A |
| ENSG00000167508 | MVD |
| ENSG00000115541 | HSPE1 |
| ENSG00000170445 | HARS |
| ENSG00000168496 | FEN1 |
| ENSG00000141367 | CLTC |
| ENSG00000087191 | PSMC5 |
| ENSG00000163159 | VPS72 |
| ENSG00000130741 | EIF2S3 |
| ENSG00000168495 | POLR3D |
| ENSG00000071894 | CPSF1 |
| ENSG00000058600 | POLR3E |
| ENSG00000100726 | TELO2 |
| ENSG00000165501 | LRR1 |
| ENSG00000113575 | PPP2CA |
| ENSG00000116922 | C1orf109 |
| ENSG00000073712 | FERMT2 |
| ENSG00000174437 | ATP2A2 |
| ENSG00000176407 | KCMF1 |
| ENSG00000140525 | FANCI |
| ENSG00000101182 | PSMA7 |
| ENSG00000130204 | TOMM40 |
| ENSG00000239306 | RBM14 |
| ENSG00000248643 | RBM14-RBM4 |
| ENSG00000172113 | NME6 |
| ENSG00000136448 | NMT1 |
| ENSG00000186166 | CCDC84 |
| ENSG00000166233 | ARIH1 |
| ENSG00000111877 | MCM9 |
| ENSG00000204316 | MRPL38 |
| ENSG00000101868 | POLA1 |
| ENSG00000107951 | MTPAP |
| ENSG00000039650 | PNKP |
| ENSG00000123064 | DDX54 |
| ENSG00000183955 | SETD8 |
| ENSG00000138107 | ACTR1A |
| ENSG00000244005 | NFS1 |
| ENSG00000188986 | NELFB |
| ENSG00000018699 | TTC27 |
| ENSG00000167112 | TRUB2 |
| ENSG00000100393 | EP300 |
| ENSG00000101639 | CEP192 |
| ENSG00000126461 | SCAF1 |
| ENSG00000172171 | TEFM |
| ENSG00000135913 | USP37 |
| ENSG00000135624 | CCT7 |
| ENSG00000100804 | PSMB5 |
| ENSG00000175792 | RUVBL1 |
| ENSG00000183431 | SF3A3 |
| ENSG00000108773 | KAT2A |
| ENSG00000100949 | RABGGTA |
| ENSG00000151503 | NCAPD3 |
| ENSG00000111880 | RNGTT |
| ENSG00000168883 | USP39 |
| ENSG00000151461 | UPF2 |
| ENSG00000105486 | LIG1 |
| ENSG00000111300 | NAA25 |
| ENSG00000144559 | TAMM41 |
| ENSG00000137574 | TGS1 |
| ENSG00000172273 | HINFP |
| ENSG00000133112 | TPT1 |
| ENSG00000167986 | DDB1 |
| ENSG00000125319 | C17orf53 |
| ENSG00000113161 | HMGCR |
| ENSG00000100941 | PNN |
| ENSG00000139697 | SBNO1 |
| ENSG00000135336 | ORC3 |
| ENSG00000101115 | SALL4 |
| ENSG00000100902 | PSMA6 |
| ENSG00000141141 | DDX52 |
| ENSG00000254093 | PINX1 |
| ENSG00000184445 | KNTC1 |
| ENSG00000089053 | ANAPC5 |
| ENSG00000111602 | TIMELESS |
| ENSG00000145592 | RPL37 |
| ENSG00000106615 | RHEB |
| ENSG00000180817 | PPA1 |
| ENSG00000110172 | CHRODC1 |
| ENSG00000137876 | RSL24D1 |
| ENSG00000104408 | EIF3E |
| ENSG00000143436 | MRPL9 |
| ENSG00000108883 | EFTUD2 |
| ENSG00000140740 | UQCRC2 |
| ENSG00000211456 | SACM1L |
| ENSG00000131051 | RBM39 |
| ENSG00000136758 | YME1L1 |
| ENSG00000112578 | BYSL |
| ENSG00000163781 | TOPBP1 |
| ENSG00000106628 | POLD2 |
| ENSG00000132952 | USPL1 |
| ENSG00000168538 | TRAPPC11 |
| ENSG00000168488 | ATXN2L |
| ENSG00000022277 | RTFDC1 |
| ENSG00000179988 | PSTK |
| ENSG00000092199 | HNRNPC |
| ENSG00000156831 | NSMCE2 |
| ENSG00000125691 | RPL23 |
| ENSG00000083520 | DIS3 |
| ENSG00000115761 | NOL10 |
| ENSG00000173894 | CBX2 |
| ENSG00000243147 | MRPL33 |
| ENSG00000139618 | BRCA2 |
| ENSG00000109519 | GRPEL1 |
| ENSG00000203760 | CENPW |
| ENSG00000166851 | PLK1 |
| ENSG00000121579 | NAA50 |
| ENSG00000163608 | C3orf17 |
| ENSG00000005075 | POLR2J |
| ENSG00000148606 | POLR3A |
| ENSG00000160949 | TONSL |
| ENSG00000128159 | TUBGCP6 |
| ENSG00000125449 | ARMC7 |
| ENSG00000122406 | RPL5 |
| ENSG00000126226 | PCID2 |
| ENSG00000159377 | PSMB4 |
| ENSG00000167967 | E4F1 |
| ENSG00000141076 | CIRH1A |
| ENSG00000069248 | NUP133 |
| ENSG00000242372 | EIF6 |
| ENSG00000087269 | NOP14 |
| ENSG00000163468 | CCT3 |
| ENSG00000140326 | CDAN1 |
| ENSG00000146834 | MEPCE |
| ENSG00000143222 | UFC1 |
| ENSG00000110871 | COQ5 |
| ENSG00000119285 | HEATR1 |
| ENSG00000145386 | CCNA2 |
| ENSG00000164109 | MAD2L1 |
| ENSG00000185347 | C14orf80 |
| ENSG00000134748 | PRPF38A |
| ENSG00000070061 | IKBKAP |
| ENSG00000099995 | SF3A1 |
| ENSG00000100029 | PES1 |
| ENSG00000130255 | RPL36 |
| ENSG00000085231 | AK6 |
| ENSG00000187145 | MRPS21 |
| ENSG00000062650 | WAPAL |
| ENSG00000122484 | RPAP2 |
| ENSG00000090861 | AARS |
| ENSG00000161888 | SPC24 |
| ENSG00000087087 | SRRT |
| ENSG00000134910 | STT3A |
| ENSG00000161526 | SAP30BP |
| ENSG00000068654 | POLR1A |
| ENSG00000140983 | RHOT2 |
| ENSG00000184708 | EIF4ENIF1 |
| ENSG00000100479 | POLE2 |
| ENSG00000134440 | NARS |
| ENSG00000014164 | ZC3H3 |
| ENSG00000113812 | ACTR8 |
| ENSG00000145331 | TRMT10A |
| ENSG00000110104 | CCDC86 |
| ENSG00000164163 | ABCE1 |
| ENSG00000167863 | ATP5H |
| ENSG00000176946 | THAP4 |
| ENSG00000169251 | NMD3 |
| ENSG00000166226 | CCT2 |
| ENSG00000131747 | TOP2A |
| ENSG00000267673 | FDX1L |
| ENSG00000108559 | NUP88 |
| ENSG00000104957 | CCDC130 |
| ENSG00000167522 | ANKRD11 |
| ENSG00000130706 | ADRM1 |
| ENSG00000048162 | NOP16 |
| ENSG00000159210 | SNF8 |
| ENSG00000113360 | DROSHA |
| ENSG00000108296 | CWC25 |
| ENSG00000161395 | PGAP3 |
| ENSG00000089195 | TRMT6 |
| ENSG00000185838 | GNB1L |
| ENSG00000101146 | RAE1 |
| ENSG00000092853 | CLSPN |
| ENSG00000107949 | BCCIP |
| ENSG00000159079 | C21orf59 |
| ENSG00000137947 | GTF2B |
| ENSG00000160948 | VPS28 |
| ENSG00000065427 | KARS |
| ENSG00000102978 | POLR2C |
| ENSG00000182154 | MRPL41 |
| ENSG00000139168 | ZCRB1 |
| ENSG00000175110 | MRPS22 |
| ENSG00000177084 | POLE |
| ENSG00000197681 | TBC1D3 |
| ENSG00000053501 | USE1 |
| ENSG00000121879 | PIK3CA |
| ENSG00000108278 | ZNHIT3 |
| ENSG00000161547 | SRSF2 |
| ENSG00000129083 | COPB1 |
| ENSG00000012048 | BRCA1 |
| ENSG00000171314 | PGAM1 |
| ENSG00000112159 | MDN1 |
| ENSG00000174243 | DDX23 |
| ENSG00000096401 | CDC5L |
| ENSG00000128513 | POT1 |
| ENSG00000071859 | FAM50A |
| ENSG00000100084 | HIRA |
| ENSG00000100813 | ACIN1 |
| ENSG00000005100 | DHX33 |
| ENSG00000101158 | NELFCD |
| ENSG00000115946 | PNO1 |
| ENSG00000188647 | PTAR1 |
| ENSG00000146007 | ZMAT2 |
| ENSG00000241837 | ATP5O |
| ENSG00000113643 | RARS |
| ENSG00000162521 | RBBP4 |
| ENSG00000116830 | TTF2 |
| ENSG00000187555 | USP7 |
| ENSG00000137216 | TMEM63B |
| ENSG00000161904 | LEMD62 |
| ENSG00000241945 | PWP2 |
| ENSG00000134982 | APC |
| ENSG00000156983 | BRPF1 |
| ENSG00000164346 | NSA2 |
| ENSG00000223496 | EXOSC6 |
| ENSG00000113569 | NUP155 |
| ENSG00000080986 | NDC80 |
| ENSG00000143374 | TARS2 |
| ENSG00000104835 | SARS2 |
| ENSG00000152253 | SPC25 |
| ENSG00000088356 | PDRG1 |
| ENSG00000044574 | HSPA5 |
| ENSG00000116874 | WARS2 |
| ENSG00000204531 | POU5F1 |
| ENSG00000004779 | NDUFAB1 |
| ENSG00000161981 | SNRNP25 |
| ENSG00000126457 | PRMT1 |
| ENSG00000142507 | PSMB6 |
| ENSG00000164808 | SPIDR |
| ENSG00000234972 | TBC1D3C |
| ENSG00000144554 | FANCD2 |
| ENSG00000147383 | NSDHL |
| ENSG00000165732 | DDX21 |
| ENSG00000155975 | VPS37A |
| ENSG00000002822 | MAD1L1 |
| ENSG00000179271 | GADD45GIP1 |
| ENSG00000101452 | DHX35 |
| ENSG00000074071 | MRPS34 |
| ENSG00000169045 | HNRNPH1 |
| ENSG00000087510 | TFAP2C |
| ENSG00000105819 | PMPCB |
| ENSG00000204351 | SKIV2L |
| ENSG00000160783 | PMF1 |
| ENSG00000152234 | ATP5A1 |
| ENSG00000127463 | EMC1 |
| ENSG00000124228 | DDX27 |
| ENSG00000100319 | ZMAT5 |
| ENSG00000065183 | WDR3 |
| ENSG00000058272 | PPP1R12A |
| ENSG00000136628 | EPRS |
| ENSG00000163017 | ACTG2 |
| ENSG00000104884 | ERCC2 |
| ENSG00000166483 | WEE1 |
| ENSG00000135837 | CEP350 |
| ENSG00000104897 | SF3A2 |
| ENSG00000140598 | EFTUD1 |
| ENSG00000143774 | GUK1 |
| ENSG00000085721 | RRN3 |
| ENSG00000172053 | QARS |
| ENSG00000165934 | CPSF2 |
| ENSG00000052802 | MSMO1 |
| ENSG00000135476 | ESPL1 |
| ENSG00000174177 | CTU2 |
| ENSG00000120438 | TCP1 |
| ENSG00000170892 | TSEN34 |
| ENSG00000204574 | ABCF1 |
| ENSG00000175376 | EIF1AD |
| ENSG00000146263 | MMS22L |
| ENSG00000121022 | COPS5 |
| ENSG00000168090 | COPS6 |
| ENSG00000167491 | GATAD2A |
| ENSG00000084072 | PPIE |
| ENSG00000115268 | RPS15 |
| ENSG00000163938 | GNL3 |
| ENSG00000151665 | PIGF |
| ENSG00000148843 | PDCD11 |
| ENSG00000141736 | ERBB2 |
| ENSG00000103168 | TAF1C |
| ENSG00000105401 | CDC37 |
| ENSG00000163933 | RFT1 |
| ENSG00000122085 | MTERFD2 |
| ENSG00000164032 | H2AFZ |
| ENSG00000140943 | MBTPS1 |
| ENSG00000198952 | SMG5 |
| ENSG00000169021 | UQCRFS1 |
| ENSG00000013810 | TACC3 |
| ENSG00000105258 | POLR2I |
| ENSG00000167978 | SRRM2 |
| ENSG00000095564 | BTAF1 |
| ENSG00000138095 | LRPPRC |
| ENSG00000063978 | RNF4 |
| ENSG00000162368 | CMPK1 |
| ENSG00000140829 | DHX38 |
| ENSG00000158169 | FANCC |
| ENSG00000161960 | EIF4A1 |
| ENSG00000181222 | POLR2A |
| ENSG00000165916 | PSMC3 |
| ENSG00000198060 | MARCH5 |
| ENSG00000149923 | PPP4C |
| ENSG00000111667 | USP5 |
| ENSG00000198755 | RPL10A |
| ENSG00000141499 | WRAP53 |
| ENSG00000093009 | CDC45 |
| ENSG00000105732 | ZNF574 |
| ENSG00000104064 | GABPB1 |
| ENSG00000108294 | PSMB3 |
| ENSG00000130856 | NZF236 |
| ENSG00000133980 | VRTN |
| ENSG00000149308 | NPAT |
| ENSG00000120071 | KANSL1 |
| ENSG00000129084 | PSMA1 |
| ENSG00000117877 | CD3EAP |
| ENSG00000127616 | SMARCA4 |
| ENSG00000163882 | POLR2H |
| ENSG00000183718 | TRIM52 |
| ENSG00000106803 | SEC61B |
| ENSG00000114942 | EEF1B2 |
| ENSG00000067704 | IARS2 |
| ENSG00000114686 | MRPL3 |
| ENSG00000172315 | TP53RK |
| ENSG00000173120 | KDM2A |
| ENSG00000138442 | WDR12 |
| ENSG00000145982 | FARS2 |
| ENSG00000117481 | NSUN4 |
| ENSG00000142676 | RPL11 |
| ENSG00000164615 | CAMLG |
| ENSG00000138073 | PREB |
| ENSG00000136888 | ATP6V1G1 |
| ENSG00000221829 | FANCG |
| ENSG00000198887 | SMC5 |
| ENSG00000102900 | NUP93 |
| ENSG00000108344 | PSMD3 |
| ENSG00000023191 | RNH1 |
| ENSG00000143621 | ILF2 |
| ENSG00000112855 | HARS2 |
| ENSG00000110536 | PTPMT1 |
| ENSG00000165629 | ATP5C1 |
| ENSG00000166847 | DCTN5 |
| ENSG00000104852 | SNRNP70 |
| ENSG00000203814 | HIST2H2BF |
| ENSG00000009413 | REV3L |
| ENSG00000130772 | MED18 |
| ENSG00000079313 | REXO1 |
| ENSG00000012061 | ERCC1 |
| ENSG00000111642 | CHD4 |
| ENSG00000100462 | PRMT5 |
| ENSG00000174100 | MRPL45 |
| ENSG00000101421 | CHMP4B |
| ENSG00000144028 | SNRNP200 |
| ENSG00000108592 | FTSJ3 |
| ENSG00000110048 | OSBP |
| ENSG00000147403 | RPL10 |
| ENSG00000198783 | ZNF830 |
| ENSG00000179409 | GEMIN4 |
| ENSG00000147604 | RPL7 |
| ENSG00000136824 | SMC2 |
| ENSG00000104889 | RNASEH2A |
| ENSG00000146282 | RARS2 |
| ENSG00000068784 | SRBD1 |
| ENSG00000137822 | TUBGCP4 |
| ENSG00000059691 | PET112 |
| ENSG00000066827 | ZFAT |
| ENSG00000148308 | GTF3C5 |
| ENSG00000170185 | USP38 |
| ENSG00000160201 | U2AF1 |
| ENSG00000141258 | SGSM2 |
| ENSG00000172660 | TAF15 |
| ENSG00000145833 | DDX46 |
| ENSG00000104980 | TIMM44 |
| ENSG00000097046 | CDC7 |
| ENSG00000131368 | MRPS25 |
| ENSG00000204209 | DAXX |
| ENSG00000129696 | TTI2 |
| ENSG00000108848 | LUC7L3 |
| ENSG00000013573 | DDX11 |
| ENSG00000105248 | CCDC94 |
| ENSG00000183598 | HIST2H3D |
| ENSG00000224226 | TBC1D3B |
| ENSG00000090470 | PDCD7 |
| ENSG00000031698 | SARS |
| ENSG00000108270 | AATF |
| ENSG00000159111 | MRPL10 |
| ENSG00000149806 | FAU |
| ENSG00000188739 | RBM34 |
| ENSG00000152684 | PELO |
| ENSG00000174374 | WBSCR16 |
| ENSG00000107036 | KIAA1432 |
| ENSG00000204619 | PPP1R11 |
| ENSG00000091651 | ORC6 |
| ENSG00000134480 | CCNH |
| ENSG00000164151 | KIAA0947 |
| ENSG00000164611 | PTTG1 |
| ENSG00000111445 | RFC5 |
| ENSG00000127481 | UBR4 |
| ENSG00000159352 | PSMD4 |
| ENSG00000137814 | HAUS2 |
| ENSG00000105220 | GPI |
| ENSG00000140521 | POLG |
| ENSG00000075856 | SART3 |
| ENSG00000143742 | SRP9 |
| ENSG00000163029 | SMC6 |
| ENSG00000162227 | TAF6L |
| ENSG00000100129 | EIF3L |
| ENSG00000170348 | TMED10 |
| ENSG00000182217 | HIST2H4B |
| ENSG00000183941 | HIST2H4A |
| ENSG00000116221 | MRPL37 |
| ENSG00000196235 | SUPT5H |
| ENSG00000161920 | MED11 |
| ENSG00000134690 | CDCA8 |
| ENSG00000131153 | GINS2 |
| ENSG00000138018 | EPT1 |
| ENSG00000173141 | MRP63 |
| ENSG00000154727 | GABPA |
| ENSG00000120800 | UTP20 |
| ENSG00000114767 | RRP9 |
| ENSG00000174231 | PRPF8 |
| ENSG00000137547 | MRPL15 |
| ENSG00000146576 | C7orf26 |
| ENSG00000065268 | WDR18 |
| ENSG00000147162 | OGT |
| ENSG00000198917 | C9orf114 |
| ENSG00000180822 | PSMG4 |
| ENSG00000125977 | EIF2S2 |
| ENSG00000173418 | NAA20 |
| ENSG00000155561 | NUP205 |
| ENSG00000173545 | ZNF622 |
| ENSG00000127993 | RBM48 |
| ENSG00000197102 | DYNC1H1 |
| ENSG00000119392 | GLE1 |
| ENSG00000174444 | RPL4 |
| ENSG00000149716 | ORAOV1 |
| ENSG00000155876 | RRAGA |
| ENSG00000198841 | KTI12 |
| ENSG00000056097 | ZFR |
| ENSG00000227057 | WDR46 |
| ENSG00000167670 | CHAF1A |
| ENSG00000127191 | TRAF2 |
| ENSG00000072506 | HSD17B10 |
| ENSG00000215021 | PHB2 |
| ENSG00000175467 | SART1 |
| ENSG00000121073 | SLC35B1 |
| ENSG00000079459 | FDFT1 |
| ENSG00000143493 | INTS7 |
| ENSG00000141543 | EIF4A3 |
| ENSG00000174197 | MGA |
| ENSG00000131269 | ABCB7 |
| ENSG00000089009 | RPL6 |
| ENSG00000197780 | TAF13 |
| ENSG00000036549 | ZZZ3 |
| ENSG00000066135 | KDM4A |
| ENSG00000176473 | WDR25 |
| ENSG00000124614 | RPS10 |
| ENSG00000107581 | EIF3A |
| ENSG00000084463 | WBP11 |
| ENSG00000137656 | BUD13 |
| ENSG00000183751 | TBL3 |
| ENSG00000119537 | KDSR |
| ENSG00000204220 | PFDN6 |
| ENSG00000170291 | ELP5 |
| ENSG00000198563 | DDX39B |
| ENSG00000077549 | CAPZB |
| ENSG00000255529 | POLR2M |
| ENSG00000100034 | PPM1F |
| ENSG00000196367 | TRRAP |
| ENSG00000167258 | CDK12 |
| ENSG00000039123 | SKIV2L2 |
| ENSG00000076043 | REXO2 |
| ENSG00000213676 | ATF6B |
| ENSG00000058453 | CROCC |
| ENSG00000153575 | TUBGCP5 |
| ENSG00000110700 | RPS13 |
| ENSG00000101181 | MTG2 |
| ENSG00000071539 | TRIP13 |
| ENSG00000075702 | WDR62 |
| ENSG00000171453 | POLR1C |
| ENSG00000090989 | EXOC1 |
| ENSG00000037897 | METTL1 |
| ENSG00000095139 | ARCN1 |
| ENSG00000078142 | PIK3C3 |
| ENSG00000141030 | COPS3 |
| ENSG00000126249 | PDCD2L |
| ENSG00000117408 | IPO13 |
| ENSG00000130725 | UBE2M |
| ENSG00000175054 | ATR |
| ENSG00000149016 | TUT1 |
| ENSG00000165060 | FXN |
| ENSG00000117597 | DIEXF |
| ENSG00000185085 | INTS5 |
| ENSG00000113595 | TRIM23 |
| ENSG00000040633 | PHF23 |
| ENSG00000178952 | TUFM |
| ENSG00000120539 | MASTL |
| ENSG00000103549 | RNF40 |
| ENSG00000119723 | COQ6 |
| ENSG00000171311 | EXOSC1 |
| ENSG00000106245 | BUD31 |
| ENSG00000118046 | STK11 |
| ENSG00000125484 | GTF3C4 |
| ENSG00000089094 | KDM2B |
| ENSG00000121621 | KIF18A |
| ENSG00000129911 | KLF16 |
| ENSG00000102302 | FGD1 |
| ENSG00000135679 | MDM2 |
| ENSG00000185115 | NDNL2 |
| ENSG00000140553 | UNC45A |
| ENSG00000129562 | DAD1 |
| ENSG00000100138 | NHP2L1 |
| ENSG00000111641 | NOP2 |
| ENSG00000173660 | UQCRH |
| ENSG00000198677 | TTC37 |
| ENSG00000135503 | ACVR1B |
| ENSG00000180998 | GPR137C |
| ENSG00000153187 | HNRNPU |
| ENSG00000106459 | NRF1 |
| ENSG00000156261 | CCT8 |
| ENSG00000118363 | SPCS2 |
| ENSG00000164134 | NAA15 |
| ENSG00000060642 | PIGV |
| ENSG00000090889 | KIF4A |
| ENSG00000101361 | NOP56 |
| ENSG00000167792 | NDUFV1 |
| ENSG00000184162 | NR2C2AP |
| ENSG00000128524 | ATP6V1F |
| ENSG00000100387 | RBX1 |
| ENSG00000110906 | KCTD10 |
| ENSG00000147457 | CHMP7 |
| ENSG00000124570 | SERPINB6 |
| ENSG00000186468 | RPS23 |
| ENSG00000136122 | BORA |
| ENSG00000047249 | ATP6V1H |
| ENSG00000127804 | METTL16 |
| ENSG00000104412 | EMC2 |
| ENSG00000173726 | TOMM20 |
| ENSG00000138777 | PPA2 |
| ENSG00000170043 | TRAPPC11 |
| ENSG00000168488 | ATXN2L |
| ENSG00000022277 | RTFDC1 |
| ENSG00000179988 | PSTK |
| ENSG00000092199 | HNRNPC |
| ENSG00000156831 | NSMCE2 |
| ENSG00000125691 | RPL23 |
| ENSG00000083520 | DIS3 |
| ENSG00000115761 | NOL10 |
| ENSG00000173894 | CBX2 |
| ENSG00000243147 | MRPL33 |
| ENSG00000139618 | BRCA2 |
| ENSG00000109519 | GRPEL1 |
| ENSG00000203760 | CENPW |
| ENSG00000166851 | PLK1 |
| ENSG00000121579 | NAA50 |
| ENSG00000163608 | C3orf17 |
| ENSG00000005075 | POLR2J |
| ENSG00000148606 | POLR3A |
| ENSG00000160949 | TONSL |
| ENSG00000128159 | TUBGCP6 |
| ENSG00000125449 | ARMC7 |
| ENSG00000122406 | RPL5 |
| ENSG00000126226 | PCID2 |
| ENSG00000159377 | PSMB4 |
| ENSG00000167967 | E4F1 |
| ENSG00000141076 | CIRH1A |
| ENSG00000069248 | NUP133 |
| ENSG00000242372 | EIF6 |
| ENSG00000087269 | NOP14 |
| ENSG00000163468 | CCT3 |
| ENSG00000140326 | CDAN1 |
| ENSG00000146834 | MEPCE |
| ENSG00000143222 | UFC1 |
| ENSG00000110871 | COQ5 |
| ENSG00000119285 | HEATR1 |
| ENSG00000145386 | CCNA2 |
| ENSG00000164109 | MAD2L1 |
| ENSG00000185347 | C14orf80 |
| ENSG00000134748 | PRPF38A |
| ENSG00000070061 | IKBKAP |
| ENSG00000099995 | SF3A1 |
| ENSG00000100029 | PES1 |
| ENSG00000130255 | RPL36 |
| ENSG00000085231 | AK6 |
| ENSG00000187145 | MRPS21 |
| ENSG00000062650 | WAPAL |
| ENSG00000122484 | RPAP2 |
| ENSG00000090861 | AARS |
| ENSG00000161888 | SPC24 |
| ENSG00000087087 | SRRT |
| ENSG00000134910 | STT3A |
| ENSG00000161526 | SAP30BP |
| ENSG00000068654 | POLR1A |
| ENSG00000140983 | RHOT2 |
| ENSG00000184708 | EIF4ENIF1 |
| ENSG00000100479 | POLE2 |
| ENSG00000134440 | NARS |
| ENSG00000014164 | ZC3H3 |
| ENSG00000113812 | ACTR8 |
| ENSG00000145331 | TRMT10A |
| ENSG00000110104 | CCDC86 |
| ENSG00000164163 | ABCE1 |
| ENSG00000167863 | ATP5H |
| ENSG00000176946 | THAP4 |
| ENSG00000169251 | NMD3 |
| ENSG00000166226 | CCT2 |
| ENSG00000131747 | TOP2A |
| ENSG00000267673 | TDX1L |
| ENSG00000108559 | NUP88 |
| ENSG00000104957 | CCDC130 |
| ENSG00000167522 | ANKRD11 |
| ENSG00000130706 | ADRM1 |
| ENSG00000048162 | NOP16 |
| ENSG00000159210 | SNF8 |
| ENSG00000113360 | DROSHA |
| ENSG00000108296 | CWC25 |
| ENSG00000161395 | PGAP3 |
| ENSG00000089195 | TRMT6 |
| ENSG00000185838 | GNB1L |
| ENSG00000101146 | RAE1 |
| ENSG00000092853 | CLSPN |
| ENSG00000107949 | BCCIP |
| ENSG00000159079 | C21orf59 |
| ENSG00000137947 | GTF2B |
| ENSG00000160948 | VPS28 |
| ENSG00000065427 | KARS |
| ENSG00000102978 | POLR2C |
| ENSG00000182154 | MRPL41 |
| ENSG00000139168 | ZCRB1 |
| ENSG00000175110 | MRPS22 |
| ENSG00000177084 | POLE |
| ENSG00000197681 | TBC1D3 |
| ENSG00000053501 | USE1 |
| ENSG00000121879 | PIK3CA |
| ENSG00000108278 | ZNHIT3 |
| ENSG00000161547 | SRSF2 |
| ENSG00000129083 | COPB1 |
| ENSG00000012048 | BRCA1 |
| ENSG00000171314 | PGAM1 |
| ENSG00000112159 | MDN1 |
| ENSG00000174243 | DDX23 |
| ENSG00000096401 | CDC5L |
| ENSG00000128513 | POT1 |
| ENSG00000071859 | FAM50A |
| ENSG00000100084 | HIRA |
| ENSG00000100813 | ACIN1 |
| ENSG00000005100 | DHX33 |
| ENSG00000101158 | NELFCD |
| ENSG00000115946 | PNO1 |
| ENSG00000188647 | PTAR1 |
| ENSG00000146007 | ZMAT2 |
| ENSG00000241837 | ATP5O |
| ENSG00000113643 | RARS |
| ENSG00000162521 | RBBP4 |
| ENSG00000116830 | TTF2 |
| ENSG00000187555 | USP7 |
| ENSG00000137216 | TMEM63B |
| ENSG00000161904 | LEMD2 |
| ENSG00000241945 | PWP2 |
| ENSG00000134982 | APC |
| ENSG00000156983 | BRPF1 |
| ENSG00000164346 | NSA2 |
| ENSG00000223496 | EXOSC6 |
| ENSG00000113569 | NUP155 |
| ENSG00000080986 | NDC80 |
| ENSG00000143374 | TARS2 |
| ENSG00000104835 | SARS2 |
| ENSG00000152253 | SPC25 |
| ENSG00000088356 | PDRG1 |
| ENSG00000044574 | HSPA5 |
| ENSG00000116874 | WARS2 |
| ENSG00000204531 | POU5F1 |
| ENSG00000004779 | NDUFAB1 |
| ENSG00000161981 | SNRNP25 |
| ENSG00000126457 | PRMT1 |
| ENSG00000142507 | PSMB6 |
| ENSG00000164808 | SPIDR |
| ENSG00000234972 | TBC1D3C |
| ENSG00000144554 | FANCD2 |
| ENSG00000147383 | NSDHL |
| ENSG00000165732 | DDX21 |
| ENSG00000155975 | VPS37A |
| ENSG00000002822 | MAD1L1 |
| ENSG00000179271 | GADD45GIP1 |
| ENSG00000101452 | DHX35 |
| ENSG00000074071 | MRPS34 |
| ENSG00000169045 | HNRNPH1 |
| ENSG00000087510 | TFAP2C |
| ENSG00000105819 | PMPCB |
| ENSG00000204351 | SKIV2L |
| ENSG00000160783 | PMF1 |
| ENSG00000152234 | ATP5A1 |
| ENSG00000127463 | EMC1 |
| ENSG00000124228 | DDX27 |
| ENSG00000100319 | ZMAT5 |
| ENSG00000065183 | WDR3 |
| ENSG00000058272 | PPP1R12A |
| ENSG00000136628 | EPRS |
| ENSG00000163017 | ACTG2 |
| ENSG00000104884 | ERCC2 |
| ENSG00000166483 | WEE1 |
| ENSG00000135837 | CEP350 |
| ENSG00000104897 | SF3A2 |
| ENSG00000140598 | EFTUD1 |
| ENSG00000143774 | GUK1 |
| ENSG00000085721 | RRN3 |
| ENSG00000172053 | QARS |
| ENSG00000165934 | CPSF2 |
| ENSG00000052802 | MSMO1 |
| ENSG00000135476 | ESPL1 |
| ENSG00000174177 | CTU2 |
| ENSG00000120438 | TCP1 |
| ENSG00000170892 | TSEN34 |
| ENSG00000204574 | ABCF1 |
| ENSG00000175376 | EIF1AD |
| ENSG00000146263 | MMS22L |
| ENSG00000121022 | COPS5 |
| ENSG00000168090 | COPS6 |
| ENSG00000167491 | GATAD2A |
| ENSG00000084072 | PPIE |
| ENSG00000115268 | RPS15 |
| ENSG00000163938 | GNL3 |
| ENSG00000151665 | PIGF |
| ENSG00000148843 | PDCD11 |
| ENSG00000141736 | ERBB2 |
| ENSG00000103168 | TAF1C |
| ENSG00000105401 | CDC37 |
| ENSG00000163933 | RFT1 |
| ENSG00000122085 | MTERFD2 |
| ENSG00000164032 | H2AFZ |
| ENSG00000140943 | MBTPS1 |
| ENSG00000198952 | SMG5 |
| ENSG00000169021 | UQCRFS1 |
| ENSG00000013810 | TACC3 |
| ENSG00000105258 | POLR2I |
| ENSG00000167978 | SRRM2 |
| ENSG00000095564 | BTAF1 |
| ENSG00000138095 | LRPPRC |
| ENSG00000063978 | RNF4 |
| ENSG00000162368 | CMPK1 |
| ENSG00000140829 | DHX38 |
| ENSG00000158169 | FANCC |
| ENSG00000161960 | EIF4A1 |
| ENSG00000181222 | POLR2A |
| ENSG00000165916 | PSMC3 |
| ENSG00000198060 | MARCH5 |
| ENSG00000149923 | PPP4C |
| ENSG00000111667 | USP5 |
| ENSG00000198755 | RPL10A |
| ENSG00000141499 | WRAP53 |
| ENSG00000093009 | CDC45 |
| ENSG00000105732 | ZNF574 |
| ENSG00000104064 | GABPB1 |
| ENSG00000108294 | PSMB3 |
| ENSG00000130856 | ZNF236 |
| ENSG00000133980 | VRTN |
| ENSG00000149308 | NPAT |
| ENSG00000120071 | KANSL1 |
| ENSG00000129084 | PSMA1 |
| ENSG00000117877 | CD3EAP |
| ENSG00000127616 | SMARCA4 |
| ENSG00000163882 | POLR2H |
| ENSG00000183718 | TRIM52 |
| ENSG00000106803 | SEC61B |
| ENSG00000114942 | EEF1B2 |
| ENSG00000067704 | IARS2 |
| ENSG00000114686 | MRPL3 |
| ENSG00000172315 | TP53RK |
| ENSG00000173120 | KDM2A |
| ENSG00000138442 | WDR12 |
| ENSG00000145982 | FARS2 |
| ENSG00000117481 | NSUN4 |
| ENSG00000142676 | RPL11 |
| ENSG00000164615 | CAMLG |
| ENSG00000138073 | PREB |
| ENSG00000136888 | ATP6V1G1 |
| ENSG00000221829 | FANCG |
| ENSG00000198887 | SMC5 |
| ENSG00000102900 | NUP93 |
| ENSG00000108344 | PSMD3 |
| ENSG00000023191 | RNH1 |
| ENSG00000143621 | ILF2 |
| ENSG00000112855 | HARS2 |
| ENSG00000110536 | PTPMT1 |
| ENSG00000165629 | ATP5C1 |
| ENSG00000166847 | DCTN5 |
| ENSG00000104852 | SNRNP70 |
| ENSG00000203814 | HIST2H2BF |
| ENSG00000009413 | REV3L |
| ENSG00000130772 | MED18 |
| ENSG00000079313 | REXO1 |
| ENSG00000012061 | ERCC1 |
| ENSG00000111642 | CHD4 |
| ENSG00000100462 | PRMT5 |
| ENSG00000174100 | MRPL45 |
| ENSG00000101421 | CHMP4B |
| ENSG00000144028 | SNRNP200 |
| ENSG00000108592 | FTSJ3 |
| ENSG00000110048 | OSBP |
| ENSG00000147403 | RPL10 |
| ENSG00000198783 | ZNF830 |
| ENSG00000179409 | GEMIN4 |
| ENSG00000147604 | RPL7 |
| ENSG00000136824 | SMC2 |
| ENSG00000104889 | RNACEH2A |
| ENSG00000146282 | RARS2 |
| ENSG00000068784 | SRBD1 |
| ENSG00000137822 | TUBGCP4 |
| ENSG00000059691 | PET112 |
| ENSG00000066827 | ZFAT |
| ENSG00000148308 | GTF3C5 |
| ENSG00000170185 | USP38 |
| ENSG00000160201 | U2AF1 |
| ENSG00000141258 | SGSM2 |
| ENSG00000172660 | TAF15 |
| ENSG00000145833 | DDX46 |
| ENSG00000104980 | TIMM44 |
| ENSG00000097046 | CDC7 |
| ENSG00000131368 | MRPS25 |
| ENSG00000204209 | DAXX |
| ENSG00000129696 | TTI2 |
| ENSG00000108848 | LUC7L3 |
| ENSG00000013573 | DDX11 |
| ENSG00000105248 | CCDC94 |
| ENSG00000183598 | HIST2H3D |
| ENSG00000224226 | TBC1D3B |
| ENSG00000090470 | PDCD7 |
| ENSG00000031698 | SARS |
| ENSG00000108270 | AATF |
| ENSG00000159111 | MRPL10 |
| ENSG00000149806 | FAU |
| ENSG00000188739 | RBM34 |
| ENSG00000152684 | PELO |
| ENSG00000174374 | WBSCR16 |
| ENSG00000107036 | KIAA1432 |
| ENSG00000204619 | PPP1R11 |
| ENSG00000091651 | ORC6 |
| ENSG00000134480 | CCNH |
| ENSG00000164151 | KIAA0947 |
| ENSG00000164611 | PTTG1 |
| ENSG00000111445 | RFC5 |
| ENSG00000127481 | UBR4 |
| ENSG00000159352 | PSMD4 |
| ENSG00000137814 | HAUS2 |
| ENSG00000105220 | GPI |
| ENSG00000140521 | POLG |
| ENSG00000075856 | START3 |
| ENSG00000143742 | SRP9 |
| ENSG00000163029 | SMC6 |
| ENSG00000162227 | TAF6L |
| ENSG00000100129 | EIF3L |
| ENSG00000170348 | TMED10 |
| ENSG00000182214 | HIST2H4B |
| ENSG00000183941 | HIST2H4A |
| ENSG00000116221 | MRPL37 |
| ENSG00000196235 | SUPT5H |
| ENSG00000161920 | MED11 |
| ENSG00000134690 | CDCA8 |
| ENSG00000131153 | GINS2 |
| ENSG00000138018 | EPT1 |
| ENSG00000173141 | MRP63 |
| ENSG00000154727 | GABPA |
| ENSG00000120800 | UTP20 |
| ENSG00000114767 | RRP9 |
| ENSG00000174231 | PRPF8 |
| ENSG00000137547 | MRPL15 |
| ENSG00000146576 | C7orf26 |
| ENSG00000062568 | WDR18 |
| ENSG00000147162 | OGT |
| ENSG00000198917 | C9orf114 |
| ENSG00000180822 | PSMG4 |
| ENSG00000125977 | EIF2S2 |
| ENSG00000173418 | NAA20 |
| ENSG00000155561 | NUP205 |
| ENSG00000173545 | ZNF622 |
| ENSG00000127993 | RBM48 |
| ENSG00000197102 | DYNC1H1 |
| ENSG00000119392 | GLE1 |
| ENSG00000174444 | RPL4 |
| ENSG00000149716 | ORAOV1 |
| ENSG00000266876 | RRAGA |
| ENSG00000198841 | KTI12 |
| ENSG00000056097 | ZFR |
| ENSG00000227057 | WDR46 |
| ENSG00000167670 | CHAF1A |
| ENSG00000127191 | TRAF2 |
| ENSG00000072506 | HSD17B10 |
| ENSG00000215021 | PHB2 |
| ENSG00000175467 | SART1 |
| ENSG00000121073 | SLC35B1 |
| ENSG00000079459 | FDFT1 |
| ENSG00000143493 | INTS7 |
| ENSG0000014153 | EIF4A3 |
| ENSG00000174197 | MGA |
| ENSG00000131269 | ABCB7 |
| ENSG00000089009 | RPL6 |
| ENSG00000197780 | TAF13 |
| ENSG00000036549 | ZZZ3 |
| ENSG00000066135 | KDM4A |
| ENSG00000176473 | WDR25 |
| ENSG00000124614 | RPS10 |
| ENSG00000107581 | EIF3A |
| ENSG00000084463 | WBP11 |
| ENSG00000137656 | BUD13 |
| ENSG00000183751 | TBL3 |
| ENSG00000119537 | KDSR |
| ENSG00000204220 | PFDN6 |
| ENSG00000170291 | ELP5 |
| ENSG00000198563 | DDX39B |
| ENSG00000077549 | CAPZB |
| ENSG00000255529 | POLR2M |
| ENSG00000100034 | PPM1F |
| ENSG00000196367 | TRRAP |
| ENSG00000167258 | CDK12 |
| ENSG00000039123 | SKIV2L2 |
| ENSG00000076043 | REXO2 |
| ENSG00000213676 | ATF6B |
| ENSG00000058453 | CROCC |
| ENSG00000153575 | TUBGCP5 |
| ENSG00000110700 | RPS13 |
| ENSG00000101181 | MTG2 |
| ENSG00000071539 | TRIP13 |
| ENSG00000075702 | WDR62 |
| ENSG00000171453 | POLR1C |
| ENSG00000090989 | EXOC1 |
| ENSG00000037897 | METTL1 |
| ENSG00000095139 | ARCN1 |
| ENSG00000078142 | PIK3C3 |
| ENSG00000141030 | COPS3 |
| ENSG00000126249 | PDCD2L |
| ENSG00000117408 | IPO13 |
| ENSG00000130725 | UBE2M |
| ENSG00000175054 | ATR |
| ENSG00000149016 | TUT1 |
| ENSG00000165060 | FXN |
| ENSG00000117597 | DIEXF |
| ENSG00000185085 | INTS5 |
| ENSG00000113595 | TRIM23 |
| ENSG00000040633 | PHF23 |
| ENSG00000178952 | TUFM |
| ENSG00000120539 | MASTL |
| ENSG00000103549 | RNF40 |
| ENSG00000119723 | COQ6 |
| ENSG00000171311 | EXOSC1 |
| ENSG00000106245 | BUD31 |
| ENSG00000118046 | STK11 |
| ENSG00000125484 | GTF3C4 |
| ENSG00000089094 | KDM2B |
| ENSG00000121621 | KIF18A |
| ENSG00000129911 | KLF16 |
| ENSG00000102302 | FGD1 |
| ENSG00000135679 | MDM2 |
| ENSG00000185115 | NDNL2 |
| ENSG00000140553 | UNC45A |
| ENSG00000129562 | DAD1 |
| ENSG00000100138 | NHP2L1 |
| ENSG00000111641 | NOP2 |
| ENSG00000173660 | UQCRH |
| ENSG00000198677 | TTC37 |
| ENSG00000135503 | ACVR1B |
| ENSG00000180998 | GPR137C |
| ENSG00000153187 | HNRNPU |
| ENSG00000106459 | NRF1 |
| ENSG00000156261 | CCT8 |
| ENSG00000118363 | SPCS2 |
| ENSG00000164134 | NAA15 |
| ENSG00000060642 | PIGV |
| ENSG00000090889 | KIF4A |
| ENSG00000101361 | NOP56 |
| ENSG00000167792 | NDUFV1 |
| ENSG00000184162 | NR2C2AP |
| ENSG00000128524 | ATP6V1F |
| ENSG00000100387 | RBX1 |
| ENSG00000110906 | KCTD10 |
| ENSG00000147457 | CHMP7 |
| ENSG00000124570 | SERPINB6 |
| ENSG00000186468 | RPS23 |
| ENSG00000136122 | BORA |
| ENSG00000047249 | ATP6V1H |
| ENSG00000127804 | METTL16 |
| ENSG00000104412 | EMC2 |
| ENSG00000173726 | TOMM20 |
| ENSG00000138777 | PPA2 |
| ENSG00000170043 | TRAPPC1 |
| ENSG00000124486 | USP9X |
| ENSG00000105705 | SUGP1 |
| ENSG00000223501 | VPS52 |
| ENSG00000107815 | C10orf2 |
| ENSG00000100109 | TFIP11 |
| ENSG00000136271 | DDX56 |
| ENSG00000146830 | GIGYF1 |
| ENSG00000198382 | UVRAG |
| ENSG00000160285 | LSS |
| ENSG00000137770 | CTDSPL2 |
| ENSG00000116670 | MAD2L2 |
| ENSG00000165280 | VCP |
| ENSG00000183963 | SMTN |
| ENSG00000164961 | KIAA0196 |
| ENSG00000157216 | SSBP3 |
| ENSG00000129932 | DOHH |
| ENSG00000167721 | TSR1 |
| ENSG00000188352 | FOCAD |
| ENSG00000104853 | CLPTM1 |
| ENSG00000185883 | ATP6V0C |
| ENSG00000100519 | PSMC6 |
| ENSG00000110107 | PRPF19 |
| ENSG00000184203 | PPP1R2 |
| ENSG00000148824 | MTG1 |
| ENSG00000113810 | SMC4 |
| ENSG00000121152 | NCAPH |
| ENSG00000241127 | YAE1D1 |
| ENSG00000139197 | PEX5 |
| ENSG00000101464 | PIGU |
| ENSG00000132676 | DAP3 |
| ENSG00000135972 | MRPS9 |
| ENSG00000089157 | RPLP0 |
| ENSG00000138035 | PNPT1 |
| ENSG00000171824 | EXOSC10 |
| ENSG00000153179 | RASSF3 |
| ENSG00000110713 | NUP98 |
| ENSG00000100865 | CINP |
| ENSG00000136045 | PWP1 |
| ENSG00000167526 | RPL13 |
| ENSG00000088766 | CRLS1 |
| ENSG00000103510 | KAT8 |
| ENSG00000143368 | SF3B4 |
| ENSG00000156697 | UTP14A |
| ENSG00000176248 | ANAPC2 |
| ENSG00000188786 | MTF1 |
| ENSG00000175756 | AURKAIP1 |
| ENSG00000140395 | WDR61 |
| ENSG00000113368 | LMNB1 |
| ENSG00000060339 | CCAR1 |
| ENSG00000162385 | MAGOH |
| ENSG00000105372 | RPS19 |
| ENSG00000083312 | TNPO1 |
| ENSG00000100142 | POLR2F |
| ENSG00000204560 | DHX16 |
| ENSG00000197771 | MCMBP |
| ENSG00000099817 | POLR2E |
| ENSG00000161980 | POLR3K |
| ENSG00000117133 | RPF1 |
| ENSG00000125901 | MRPS26 |
| ENSG00000168827 | GFM1 |
| ENSG00000161513 | FDXR |
| ENSG00000137818 | RPLP1 |
| ENSG00000150990 | DHX37 |
| ENSG00000061794 | MRPS35 |
| ENSG00000143155 | TIPRL |
| ENSG00000253626 | EIF5AL1 |
| ENSG00000231500 | RPS18 |
| ENSG00000188076 | SCGB1C1 |
| ENSG00000174442 | ZWILCH |
| ENSG00000242028 | HYPK |
| ENSG00000124217 | MOCS3 |
| ENSG00000134186 | PRPF38B |
| ENSG00000105849 | TWISTNB |
| ENSG00000137337 | MDC1 |
| ENSG00000132207 | SLX1A |
| ENSG00000181625 | SLX1B |
| ENSG00000110717 | NDUFS8 |
| ENSG00000132341 | RAN |
| ENSG00000014123 | UFL1 |
| ENSG00000101191 | DIDO1 |
| ENSG00000125952 | MAX |
| ENSG00000163714 | U2SURP |
| ENSG00000253710 | ALG11 |
| ENSG00000104356 | POP1 |
| ENSG00000130826 | DKC1 |
| ENSG00000198780 | FAM169A |
| ENSG00000116688 | MFN2 |
| ENSG00000166166 | TRMT61A |
| ENSG00000214517 | PPME1 |
| ENSG00000077253 | GTF3C1 |
| ENSG00000152240 | HAUS1 |
| ENSG00000063177 | RPL18 |
| ENSG00000087157 | PGS1 |
| ENSG00000100567 | PSMA3 |
| ENSG00000169371 | SNUPN |
| ENSG00000197651 | CCER1 |
| ENSG00000198900 | TOP1 |
| ENSG00000213551 | DNAJC9 |
| ENSG00000152464 | RPP38 |
| ENSG00000131467 | PSME3 |
| ENSG00000223510 | CDRT15 |
| ENSG00000115053 | NCL |
| ENSG00000163041 | H3F3A |
| ENSG00000154813 | DPH3 |
| ENSG00000181873 | IBA57 |
| ENSG00000185591 | SP1 |
| ENSG00000115355 | CCDC88A |
| ENSG00000139350 | NEDD1 |
| ENSG00000108518 | PFN1 |
| ENSG00000108264 | TADA2A |
| ENSG00000134809 | TIMM10 |
| ENSG00000124383 | MPHOSPH10 |
| ENSG00000126067 | PSMB2 |
| ENSG00000060688 | SNRNP40 |
| ENSG00000042429 | MED17 |
| ENSG00000196655 | TRAPPC4 |
| ENSG00000107185 | RGP1 |
| ENSG00000124608 | AARS2 |
| ENSG00000092098 | RNF31 |
| ENSG00000143569 | UBAP2L |
| ENSG00000233822 | HIST1H2BN |
| ENSG00000171848 | RRM2 |
| ENSG00000183161 | FANCF |
| ENSG00000166197 | NOLC1 |
| ENSG00000064703 | DDX20 |
| ENSG00000176102 | CSTF3 |
| ENSG00000106028 | SSBP1 |
| ENSG00000143315 | PIGM |
| ENSG00000136152 | COG3 |
| ENSG00000134697 | GNL2 |
| ENSG00000159217 | IGF2BP1 |
| ENSG00000080608 | KIAA0020 |
| ENSG00000267368 | UPK3BL |
| ENSG00000130119 | GNL3L |
| ENSG00000178950 | GAK |
| ENSG00000205659 | LIN52 |
| ENSG00000123297 | TSFM |
| ENSG00000241370 | RPP21 |
| ENSG00000129351 | ILF3 |
| ENSG00000174446 | SNAPC5 |
| ENSG00000132382 | MYBBP1A |
| ENSG00000100664 | EIF5 |
| ENSG00000131469 | RPL27 |
| ENSG00000185128 | TBC1D3F |
| ENSG00000111231 | GPN3 |
| ENSG00000182774 | RPS17L |
| ENSG00000184779 | RPS17 |
| ENSG00000186871 | ERCC6L |
| ENSG00000204568 | MRPS18B |
| ENSG00000108312 | UBTF |
| ENSG00000167965 | MLST8 |
| ENSG00000115241 | PPM1G |
| ENSG00000171103 | TRMT61B |
| ENSG00000116586 | LAMTOR2 |
| ENSG00000105793 | GTPBP10 |
| ENSG00000100348 | TXN2 |
| ENSG00000172757 | CFL1 |
| ENSG00000163634 | THOC7 |
| ENSG00000008324 | SS18L2 |
| ENSG00000152404 | CWF19L2 |
| ENSG00000020129 | NCDN |
| ENSG00000181449 | SOX2 |
| ENSG00000136997 | MYC |
| ENSG00000175166 | PSMD2 |
| ENSG00000070614 | NDST1 |
| ENSG00000115484 | CCT4 |
| ENSG00000100890 | KIAA0391 |
| ENSG00000149474 | CSRP2BP |
| ENSG00000102738 | MRPS31 |
| ENSG00000136104 | RNASEH2B |
| ENSG00000106246 | PTCD1 |
| ENSG00000248919 | ATP5J2-PTCD1 |
| ENSG00000138663 | COPS4 |
| ENSG00000115368 | WDR75 |
| ENSG00000128564 | VGF |
| ENSG00000128191 | DGCR8 |
| ENSG00000008294 | SPAG9 |
| ENSG00000131475 | VPS25 |
| ENSG00000105523 | FAM83E |
| ENSG00000172269 | DPAGT1 |
| ENSG00000170312 | CDK1 |
| ENSG00000104131 | EIF3J |
| ENSG00000150753 | CCT5 |
| ENSG00000140443 | IGF1R |
| ENSG00000010292 | NCAPD2 |
| ENSG00000171763 | SPATA5L1 |
| ENSG00000180098 | TRNAU1AP |
| ENSG00000168374 | ARF4 |
| ENSG00000173812 | EIF1 |
| ENSG00000100554 | ATP6V1D |
| ENSG00000072756 | TRNT1 |
| ENSG00000135372 | NAT10 |
| ENSG00000178394 | HTR1A |
| ENSG00000128272 | ATF4 |
| ENSG00000204070 | SYS1 |
| ENSG00000137815 | RTF1 |
| ENSG00000198026 | ZNF335 |
| ENSG00000117410 | ATP6V0B |
| ENSG00000112739 | PRPF4B |
| ENSG00000129347 | KRI1 |
| ENSG00000221818 | EBF2 |
| ENSG00000198431 | TXNRD1 |
| ENSG00000104979 | C19orf53 |
| ENSG00000136709 | WDR33 |
| ENSG00000149100 | EIF3M |
| ENSG00000125835 | SNRPB |
| ENSG00000116698 | SMG7 |
| ENSG00000087586 | AURKA |
| ENSG00000169230 | PRELID1 |
| ENSG00000143799 | PARP1 |
| ENSG00000146731 | CCT6A |
| ENSG00000163877 | SNIP1 |
| ENSG00000215421 | ZNF407 |
| ENSG00000197724 | PHF2 |
| ENSG00000172590 | MRPL52 |
| ENSG00000175203 | DCTN2 |
| ENSG00000149273 | RPS3 |
| ENSG00000204822 | MRPL53 |
| ENSG00000109775 | UFSP2 |
| ENSG00000165733 | BMS1 |
| ENSG00000104671 | DCTN6 |
| ENSG00000175224 | ATG13 |
| ENSG00000142541 | RPL13A |
| ENSG00000173805 | HAP1 |
| ENSG00000115750 | TAF1B |
| ENSG00000165688 | PMPCA |
| ENSG00000159720 | ATP6V0D1 |
| ENSG00000074201 | CLNS1A |
| ENSG00000158417 | EIF5B |
| ENSG00000196588 | MKL1 |
| ENSG00000138614 | VWA9 |
| ENSG00000124571 | XPO5 |
| ENSG00000198000 | NOL8 |
| ENSG00000181991 | MRPS11 |
| ENSG00000149823 | VPS51 |
| ENSG00000151348 | EXT2 |
| ENSG00000162396 | PARS2 |
| ENSG00000204843 | DCTN1 |
| ENSG00000177302 | TOP3A |
| ENSG00000142684 | ZNF593 |
| ENSG00000074800 | ENO1 |
| ENSG00000167513 | CDT1 |
| ENSG00000141101 | NOB1 |
| ENSG00000047315 | POLR2B |
| ENSG00000131966 | ACTR10 |
| ENSG00000115875 | SRSF7 |
| ENSG00000186141 | POLR3C |
| ENSG00000108424 | KPNB1 |
| ENSG00000111845 | PAK1IP1 |
| ENSG00000148832 | PAOX |
| ENSG00000156017 | C9orf41 |
| ENSG00000198901 | PRC1 |
| ENSG00000134001 | EIF2S1 |
| ENSG00000146918 | NCAPG2 |
| ENSG00000144713 | RPL32 |
| ENSG00000185122 | HSF1 |
| ENSG00000167658 | EEF2 |
| ENSG00000164190 | NIPBL |
| ENSG00000163902 | RPN1 |
| ENSG00000244045 | TMEM199 |
| ENSG00000143476 | DTL |
| ENSG00000149503 | INCENP |
| ENSG00000071243 | ING3 |
| ENSG00000186073 | C15orf41 |
| ENSG00000088836 | SLC4A11 |
| ENSG00000136273 | HUS1 |
| ENSG00000005007 | UPF1 |
| ENSG00000070010 | UFD1L |
| ENSG00000106263 | EIF3B |
| ENSG00000213024 | NUP62 |
| ENSG00000067191 | CACNB1 |
| ENSG00000179091 | CYC1 |
| ENSG00000113312 | TTC1 |
| ENSG00000085831 | TTC39A |
| ENSG00000118197 | DDX59 |
| ENSG00000134871 | COL4A2 |
| ENSG00000088986 | DYNLL1 |
| ENSG00000138778 | CENPE |
| ENSG00000106244 | PDAP1 |
| ENSG00000177600 | RPLP2 |
| ENSG00000112081 | SRSF3 |
| ENSG00000100413 | POLR3H |
| ENSG00000172508 | CARNS1 |
| ENSG00000147123 | NDUFB11 |
| ENSG00000119953 | SMNDC1 |
| ENSG00000111640 | GAPDH |
| ENSG00000117899 | MESDC2 |
| ENSG00000075624 | ACTB |
| ENSG00000163166 | IWS1 |
| ENSG00000114503 | NCBP2 |
| ENSG00000198522 | GPN1 |
| ENSG00000099899 | TRMT2A |
| ENSG00000181544 | FANCB |
| ENSG00000136982 | DSCC1 |
| ENSG00000068366 | ACSL4 |
| ENSG00000062716 | VMP1 |
| ENSG00000111802 | TDP2 |
| ENSG00000185627 | PSMD13 |
| ENSG00000020426 | MNAT1 |
| ENSG00000113734 | BNIP1 |
| ENSG00000102241 | HTATSF1 |
| ENSG00000160789 | LMNA |
| ENSG00000062822 | POLD1 |
| ENSG00000168944 | CEP120 |
| ENSG00000139718 | SETD1B |
| ENSG00000132792 | CTNNBL1 |
| ENSG00000173540 | GMPPB |
| ENSG00000128789 | PSMG2 |
| ENSG00000196365 | LONP1 |
| ENSG00000160214 | RRP1 |
| ENSG00000179041 | RRS1 |
| ENSG00000143106 | PSMA5 |
| ENSG00000168411 | RFWD3 |
| ENSG00000073584 | SMARCE1 |
| ENSG00000175334 | BANF1 |
| ENSG00000077152 | UBE2T |
| ENSG00000173611 | SCAI |
| ENSG00000171720 | HDAC3 |
| ENSG00000182197 | EXT1 |
| ENSG00000114346 | ECT2 |
| ENSG00000124214 | STAU1 |
| ENSG00000126254 | RBM42 |
| ENSG00000127184 | COX7C |
| ENSG00000174276 | ZNHIT2 |
| ENSG00000177971 | IMP3 |
| ENSG00000104872 | PIH1D1 |
| ENSG00000132155 | RAF1 |
| ENSG00000163872 | YEATS2 |
| ENSG00000119906 | FAM178A |
| ENSG00000217930 | PAM16 |
| ENSG00000197498 | RPF2 |
| ENSG00000130348 | QRSL1 |
| ENSG00000147536 | GINS4 |
| ENSG00000174748 | RPL15 |
| ENSG00000159147 | DONSON |
| ENSG00000157593 | SLC35B2 |
| ENSG00000181938 | GINS3 |
| ENSG00000187446 | CHP1 |
| ENSG00000070371 | CLTCL1 |
| ENSG00000096063 | SRPK1 |
| ENSG00000141564 | RPTOR |
| ENSG00000108474 | PIGL |
| ENSG00000187741 | FANCA |
| ENSG00000213465 | ARL2 |
| ENSG00000117593 | DARS2 |
| ENSG00000171863 | RPS7 |
| ENSG00000117395 | EBNA1BP2 |
| ENSG00000111142 | METAP2 |
| ENSG00000113272 | THG1L |
| ENSG00000117360 | PRPF3 |
| ENSG00000221978 | CCNL2 |
| ENSG00000163832 | ELP6 |
| ENSG00000108852 | MPP2 |
| ENSG00000175832 | ETV4 |
| ENSG00000185359 | HGS |
| ENSG00000120705 | ETF1 |
| ENSG00000108384 | RAD51C |
| ENSG00000036257 | CUL3 |
| ENSG00000152382 | TADA1 |
| ENSG00000114742 | WDR48 |
| ENSG00000214026 | MRPL23 |
| ENSG00000105671 | DDX49 |
| ENSG00000104731 | KLHDC4 |
| ENSG00000010256 | UQCRC1 |
| ENSG00000154743 | TSEN2 |
| ENSG00000178896 | EXOSC4 |
| ENSG00000168393 | DTYMK |
| ENSG00000035928 | RFC1 |
| ENSG00000048707 | VPS13D |
| ENSG00000154832 | CXXC1 |
| ENSG00000130985 | UBA1 |
| ENSG00000065150 | IPO5 |
| ENSG00000161800 | RACGAP1 |
| ENSG00000142534 | RPS11 |
| ENSG00000136003 | ISCU |
| ENSG00000065000 | AP3D1 |
| ENSG00000100401 | RANGAP1 |
| ENSG00000196230 | TUBB |
| ENSG00000181555 | SETD2 |
| ENSG00000055950 | MRPL43 |
| ENSG00000188389 | PDCD1 |
| ENSG00000165684 | SNAPC4 |
| ENSG00000147533 | GOLGA7 |
| ENSG00000064313 | TAF2 |
| ENSG00000137154 | RPS6 |
| ENSG00000104886 | PLEKHJ1 |
| ENSG00000122882 | ECD |
| ENSG00000184967 | NOC4L |
| ENSG00000088325 | TPX2 |
| ENSG00000183520 | UTP11L |
| ENSG00000179051 | RCC2 |
| ENSG00000157510 | AFAP1L1 |
| ENSG00000066379 | ZNRD1 |
| ENSG00000172115 | CYCS |
| ENSG00000086827 | ZW10 |
| ENSG00000109534 | GAR1 |
| ENSG00000175387 | SMAD2 |
| ENSG00000115947 | ORC4 |
| ENSG00000010072 | SPRTN |
| ENSG00000185163 | DDX51 |
| ENSG00000177370 | TIMM22 |
| ENSG00000076924 | XAB2 |
| ENSG00000124562 | SNRPC |
| ENSG00000127586 | CHTF18 |
| ENSG00000066117 | SMARCD1 |
| ENSG00000177494 | ZBED2 |
| ENSG00000133401 | PDZD2 |
| ENSG00000127554 | GFER |
| ENSG00000117697 | NSL1 |
| ENSG00000184659 | FOXD4L4 |
| ENSG00000204828 | FOXD4L2 |
| ENSG00000110200 | ANAPC15 |
| ENSG00000169291 | SHE |
| ENSG00000132313 | MRPL35 |
| ENSG00000115816 | CEBPZ |
| ENSG00000243667 | WDR92 |
| ENSG00000107959 | PITRM1 |
| ENSG00000103035 | PSMD7 |
| ENSG00000163946 | FAM208A |
| ENSG00000178057 | NDUFAF3 |
| ENSG00000170540 | ARL6IP1 |
| ENSG00000091009 | RBM27 |
| ENSG00000205609 | EIF3CL |
| ENSG00000165526 | RPUSD4 |
| ENSG00000120314 | WDR55 |
| ENSG00000013275 | PSMC4 |
| ENSG00000131931 | THAP1 |
| ENSG00000155660 | PDIA4 |
| ENSG00000162607 | USP1 |
| ENSG00000109606 | DHX15 |
| ENSG00000261949 | LOC100507003 |
| ENSG00000130589 | HELZ2 |
| ENSG00000145734 | BDP1 |
| ENSG00000103194 | USP10 |
| ENSG00000076201 | PTPN23 |
| ENSG00000140854 | KATNB1 |
| ENSG00000164053 | ATRIP |
| ENSG00000167088 | SNRPD1 |
| ENSG00000154781 | CCDC174 |
| ENSG00000115446 | UNC50 |
| ENSG00000177700 | POLR2L |
| ENSG00000162063 | CCNF |
| ENSG00000152904 | GGPS1 |
| ENSG00000151657 | KIN |
| ENSG00000182810 | DDX28 |
| ENSG00000006744 | ELAC2 |
| ENSG00000116898 | MRPS15 |
| ENSG00000255072 | PIGY |
| ENSG00000130332 | LSM7 |
| ENSG00000051180 | RAD51 |
| ENSG00000178171 | AMER3 |
| ENSG00000254901 | MEF2BNB |
| ENSG00000149925 | ALDOA |
| ENSG00000100604 | CHGA |
| ENSG00000172602 | RND1 |
| ENSG00000138592 | USP8 |
| ENSG00000172613 | RAD9A |
| ENSG00000132196 | HSD17B7 |
| ENSG00000151849 | CENPJ |
| ENSG00000105221 | AKT2 |
| ENSG00000185504 | C17orf70 |
| ENSG00000025796 | SEC63 |
| ENSG00000168438 | CDC40 |
| ENSG00000163918 | RFC4 |
| ENSG00000152147 | GEMIN6 |
| ENSG00000166887 | VPS39 |
| ENSG00000018625 | ATP1A2 |
| ENSG00000163346 | PBXIP1 |
| ENSG00000135966 | TGFBRAP1 |
| ENSG00000099901 | RANBP1 |
| ENSG00000010327 | STAB1 |
| ENSG00000163344 | PMVK |
| ENSG00000102921 | N4BP1 |
| ENSG00000177150 | FAM210A |
| ENSG00000158042 | MRPL17 |
| ENSG00000124659 | TBCC |
| ENSG00000113593 | PPWD1 |
| ENSG00000188306 | LRRIQ4 |
| ENSG00000074966 | TXK |
| ENSG00000228049 | POLR2J2 |
| ENSG00000133226 | SRRM1 |
| ENSG00000121577 | POPDC2 |
| ENSG00000130876 | SLC7A10 |
| ENSG00000130810 | PPAN |
| ENSG00000243207 | PPAN-P2RY11 |
| ENSG00000081248 | CACNA1S |
| ENSG00000153201 | RANBP2 |
| ENSG00000126698 | DNAJC8 |
| ENSG00000103018 | CYB5B |
| ENSG00000130816 | DNMT1 |
| ENSG00000102103 | PQBP1 |
| ENSG00000120253 | NUP43 |
| ENSG00000164327 | RICTOR |
| ENSG00000139719 | VPS33A |
| ENSG00000168566 | SNRNP48 |
| ENSG00000063244 | U2AF2 |
| ENSG00000108423 | TUBD1 |
| ENSG00000164880 | INTS1 |
| ENSG00000148297 | MED22 |
| ENSG00000185825 | BCAP31 |
| ENSG00000084623 | EIF3I |
| ENSG00000066422 | ZBTB11 |
| ENSG00000119041 | GTF3C3 |
| ENSG00000083093 | PALB2 |
| ENSG00000120699 | EXOSC8 |
| ENSG00000166135 | HIF1AN |
| ENSG00000188976 | NOC2L |
| ENSG00000102974 | CTCF |
| ENSG00000148229 | POLE3 |
| ENSG00000167118 | URM1 |
| ENSG00000176386 | CDC26 |
| ENSG00000110063 | DCPS |
| ENSG00000089737 | DDX24 |
| ENSG00000119383 | PPP2R4 |
| ENSG00000143319 | ISG20L2 |
| ENSG00000141552 | ANAPC11 |
| ENSG00000155506 | LARP1 |
| ENSG00000144867 | SRPRB |
| ENSG00000093000 | NUP50 |
| ENSG00000107937 | GTPBP4 |
| ENSG00000083635 | NUFIP1 |
| ENSG00000174527 | MYO1H |
| ENSG00000124641 | MED20 |
| ENSG00000240694 | PNMA2 |
| ENSG00000122012 | SV2C |
| ENSG00000017260 | ATP2C1 |
| ENSG00000179965 | ZNF771 |
| ENSG00000126216 | TUBGCP3 |
| ENSG00000126814 | TRMT5 |
| ENSG00000101945 | SUB39H1 |
| ENSG00000182185 | RAD51B |
| ENSG00000163681 | SLMAP |
| ENSG00000179295 | PTPN11 |
| ENSG00000004487 | KDM1A |
| ENSG00000136100 | VPS36 |
| ENSG00000168066 | SF1 |
| ENSG00000197181 | PIWIL2 |
| ENSG00000128908 | INO80 |
| ENSG00000102144 | PGK1 |
| ENSG00000007923 | DNAJC11 |
| ENSG00000143514 | TP53BP2 |
| ENSG00000076650 | GPATCH1 |
| ENSG00000130749 | ZC3H4 |
| ENSG00000062582 | MRPS24 |
| ENSG00000087085 | ACHE |
| ENSG00000197976 | AKAP17A |
| ENSG00000100028 | SNRPD3 |
| ENSG00000128731 | HERC2 |
| ENSG00000134014 | ELP3 |
| ENSG00000181163 | NPM1 |
| ENSG00000148444 | COMMD3 |
| ENSG00000095319 | NUP188 |
| ENSG00000169564 | PCBP1 |
| ENSG00000182208 | MOB2 |
| ENSG00000055070 | SZRD1 |
| ENSG00000182473 | EXOC7 |
| ENSG00000136930 | PSMB7 |
| ENSG00000107863 | ARHGAP21 |
| ENSG00000197223 | C1D |
| ENSG00000184270 | HIST2H2AB |
| ENSG00000161036 | LRWD1 |
| ENSG00000144736 | SHQ1 |
| ENSG00000137100 | DCTN3 |
| ENSG00000131149 | GSE1 |
| ENSG00000214753 | HNRNPUL2 |
| ENSG00000111358 | GTF2H3 |
| ENSG00000147677 | EIF3H |
| ENSG00000125676 | THOC2 |
| ENSG00000149554 | CHEK1 |
| ENSG00000176476 | CCDC101 |
| ENSG00000147596 | PRDM14 |
| ENSG00000092094 | OSGEP |
| ENSG00000155393 | HEATR3 |
| ENSG00000083845 | RPS5 |
| ENSG00000148296 | SURF6 |
| ENSG00000162613 | FUBP1 |
| ENSG00000182220 | ATP6AP2 |
| ENSG00000115163 | CENPA |
| ENSG00000176225 | RTTN |
| ENSG00000176208 | ATAD5 |
| ENSG00000254827 | SLC22A18AS |
| ENSG00000128708 | HAT1 |
| ENSG00000106400 | ZNHIT1 |
| ENSG00000123219 | CENPK |
| ENSG00000264424 | MYH4 |
| ENSG00000066468 | FGFR2 |
| ENSG00000095059 | DHPS |
| ENSG00000110921 | MVK |
| ENSG00000141556 | TBCD |
| ENSG00000196305 | IARS |
| ENSG00000131055 | COX4I2 |
| ENSG00000153789 | FAM92B |
| ENSG00000088930 | XRN2 |
| ENSG00000145220 | LYAR |
| ENSG00000172809 | RPL38 |
| ENSG00000108788 | MLX |
| ENSG00000197170 | PSMD12 |
| ENSG00000225899 | FRG2B |
| ENSG00000174886 | NDUFA11 |
| ENSG00000172058 | SERF1A |
| ENSG00000205572 | SERF1B |
| ENSG00000242485 | MRPL20 |
| ENSG00000089225 | TBX5 |
| ENSG00000149428 | HYOU1 |
| ENSG00000166595 | FAM96B |
| ENSG00000131462 | TUBG1 |
| ENSG00000185990 | F8A3 |
| ENSG00000197932 | F8A1 |
| ENSG00000198444 | F8A2 |
| ENSG00000031823 | RANBP3 |
| ENSG00000100353 | EIF3D |
| ENSG00000163605 | PPP4R2 |
| ENSG00000164162 | ANAPC10 |
| ENSG00000132153 | DHX30 |
| ENSG00000154723 | ATP5J |
| ENSG00000182256 | GABRG3 |
| ENSG00000119487 | MAPKAP1 |
| ENSG00000132394 | EEFSEC |
| ENSG00000122952 | ZWINT |
| ENSG00000131042 | LILRB2 |
| ENSG00000222004 | C7orf71 |
| ENSG00000168802 | CHTF8 |
| ENSG00000069849 | ATP1B3 |
| ENSG00000074582 | BCS1L |
| ENSG00000103126 | AXIN1 |
| ENSG00000187144 | SPATA21 |
| ENSG00000221914 | PPP2R2A |
| ENSG00000163386 | NBPF10 |
| ENSG00000134987 | WDR36 |
| ENSG00000132300 | PTCD3 |
| ENSG00000156931 | VPS8 |
| ENSG00000165632 | TAF3 |
| ENSG00000044115 | CTNNA1 |
| ENSG00000035403 | VCL |
| ENSG00000088256 | GNA11 |
| ENSG00000164334 | FAM170A |
| ENSG00000166225 | FRS2 |
| ENSG00000241186 | TDGF1 |
| ENSG00000196374 | HIST1H2BM |
| ENSG00000117614 | SYF2 |
| ENSG00000154222 | CC2D1B |
| ENSG00000101367 | MAPRE1 |
| ENSG00000188186 | LAMTOR4 |
| ENSG00000166924 | NYAP1 |
| ENSG00000079805 | DNM2 |
| ENSG00000011260 | UTP18 |
| ENSG00000089685 | BIRC5 |
| ENSG00000123908 | AGO2 |
| ENSG00000057935 | MTA3 |
| ENSG00000100811 | YY1 |
| ENSG00000064102 | ASUN |
| ENSG00000006025 | OSBPL7 |
| ENSG00000107372 | ZFAND5 |
| ENSG00000172922 | RNASEH2C |
| ENSG00000075089 | ACTR6 |
| ENSG00000165119 | HNRNPK |
| ENSG00000182518 | FAM104B |
| ENSG00000041802 | LSG1 |
| ENSG00000206557 | TRIM71 |
| ENSG00000124140 | SLC12A5 |
| ENSG00000063046 | EIF4B |
| ENSG00000126581 | BECN1 |
| ENSG00000171530 | TBCA |
| ENSG00000206127 | GOLGA8O |
| ENSG00000167842 | MIS12 |
| ENSG00000033011 | ALG1 |
| ENSG00000146670 | CDCA5 |
| ENSG00000198856 | OSTC |
| ENSG00000111605 | CPSF6 |
| ENSG00000087365 | SF3B2 |
| ENSG00000135845 | PIGC |
| ENSG00000100220 | RTCB |
| ENSG00000131876 | SNRPA1 |
| ENSG00000115392 | FANCL |
| ENSG00000078618 | NRD1 |
| ENSG00000025770 | NCAPH2 |
| ENSG00000117682 | DHDDS |
| ENSG00000198844 | ARHGEF15 |
| ENSG00000132603 | NIP7 |
| ENSG00000162377 | SELRC1 |
| ENSG00000137411 | VARS2 |
| ENSG00000064886 | CHI3L2 |
| ENSG00000137806 | NDUFAF1 |
| ENSG00000133030 | MPRIP |
| ENSG00000136935 | GOLGA1 |
| ENSG00000243927 | MRPS6 |
| ENSG00000046647 | GEMIN8 |
| ENSG00000133124 | IRS4 |
| ENSG00000255346 | NOX5 |
| ENSG00000103275 | UBE2I |
| ENSG00000165502 | RPL36AL |
| ENSG00000100056 | DGCR14 |
| ENSG00000167972 | ABCA3 |
| ENSG00000053372 | MRTO4 |
| ENSG00000169813 | HNRNPF |
| ENSG00000198258 | UBL5 |
| ENSG00000103245 | NARFL |
| ENSG00000183513 | COA5 |
| ENSG00000174547 | MRPL11 |
| ENSG00000173457 | PPP1R14B |
| ENSG00000088038 | CNOT3 |
| ENSG00000115539 | PDCL3 |
| ENSG00000118181 | RPS25 |
| ENSG00000160075 | SSU72 |
| ENSG00000257949 | TEN1 |
| ENSG00000168028 | RPSA |
| ENSG00000213066 | FGFR1OP |
| ENSG00000143228 | NUF2 |
| ENSG00000137413 | TAF8 |
| ENSG00000124207 | CSE1L |
| ENSG00000080815 | PSEN1 |
| ENSG00000132773 | TOE1 |
| ENSG00000129460 | NGDN |
| ENSG00000188613 | NANOS1 |
| ENSG00000163636 | PSMD6 |
| ENSG00000146232 | NFKBIE |
| ENSG00000135902 | CHRND |
| ENSG00000143641 | GALNT2 |
| ENSG00000073969 | NSF |
| ENSG00000041982 | TNC |
| ENSG00000108256 | NUFIP2 |
| ENSG00000198911 | SREBF2 |
| ENSG00000141385 | AFG3L2 |
| ENSG00000176108 | CHMP6 |
| ENSG00000257365 | FNTB |
| ENSG00000186487 | MYT1L |
| ENSG00000127423 | AUNIP |
| ENSG00000112110 | MRPL18 |
| ENSG00000114650 | SCAP |
| ENSG00000178104 | PDE4DIP |
| ENSG00000105656 | ELL |
| ENSG00000186393 | KRT26 |
| ENSG00000124541 | RRP36 |
| ENSG00000182108 | DEXI |
| ENSG00000139133 | ALG10 |
| ENSG00000082068 | WDR70 |
| ENSG00000151388 | ADAMTS12 |
| ENSG00000172172 | MRPL13 |
| ENSG00000184979 | USP18 |
| ENSG00000239857 | GET4 |
| ENSG00000069345 | DNAJA2 |
| ENSG00000073050 | XRCC1 |
| ENSG00000070985 | TRPM5 |
| ENSG00000158715 | SLC45A3 |
| ENSG00000172062 | SMN1 |
| ENSG00000205571 | SMN2 |
| ENSG00000113141 | IK |
| ENSG00000186105 | LRRC70 |
| ENSG00000157895 | C12orf43 |
| ENSG00000166441 | RPL27A |
| ENSG00000106346 | USP42 |
| ENSG00000185379 | RAD51D |
| ENSG00000116667 | C1orf21 |
| ENSG00000176444 | CLK2 |
| ENSG00000105472 | CLEC11A |
| ENSG00000065613 | SLK |
| ENSG00000005156 | LIG3 |
| ENSG00000125459 | MSTO1 |
| ENSG00000139146 | FAM60A |
| ENSG00000060069 | CTDP1 |
| ENSG00000130935 | NOL11 |
| ENSG00000115677 | HDLBP |
| ENSG00000105254 | TBCB |
| ENSG00000075539 | FRYL |
| ENSG00000196747 | HIST1H2AI |
| ENSG00000181513 | ACBD4 |
| ENSG00000153107 | ANAPC1 |
| ENSG00000160211 | G6PD |
| ENSG00000111481 | COPZ1 |
| ENSG00000070761 | C16orf80 |
| ENSG00000168924 | LETM1 |
| ENSG00000105058 | FAM32A |
| ENSG00000204569 | PPP1R10 |
| ENSG00000153914 | SREK1 |
| ENSG00000161509 | GRIN2C |
| ENSG00000162702 | ZNF281 |
| ENSG00000007939 | SLC4A1 |
| ENSG00000139620 | KANSL2 |
| ENSG00000025293 | PHF20 |
| ENSG00000158545 | ZC3H18 |
| ENSG00000142546 | NOSIP |
| ENSG00000143398 | PIP5K1A |
| ENSG00000197958 | RPL12 |
| ENSG00000067225 | PKM |
| ENSG00000172534 | HCFC1 |
| ENSG00000155438 | MKI67IP |
| ENSG00000166582 | CENPV |
| ENSG00000145912 | NHP2 |
| ENSG00000180992 | MRPL14 |
| ENSG00000118705 | RPN2 |
| ENSG00000163161 | ERCC3 |
| ENSG00000136819 | C9orf78 |
| ENSG00000124787 | RPP40 |
| ENSG00000179104 | TMTC2 |
| ENSG00000140694 | PARN |
| ENSG00000143751 | SDE2 |
| ENSG00000136997 | MYC |
| ENSG00000147274 | RBMX |
| ENSG00000084693 | AGBL5 |
| ENSG00000165271 | NOL6 |
| ENSG00000221838 | AP4M1 |
| ENSG00000171444 | MCC |
| ENSG00000101882 | NKAP |
| ENSG00000186847 | KRT14 |
| ENSG00000014824 | SLC30A9 |
| ENSG00000166685 | COG1 |
| ENSG00000108349 | CASC3 |
| ENSC00000175216 | CKAP5 |
| ENSG00000259494 | MRPL46 |
| ENSG00000028310 | BRD9 |
| ENSG00000136450 | SRSF1 |
| ENSG00000204859 | ZBTB48 |
| ENSG00000165209 | STRBP |
| ENSG00000163466 | ARPC2 |
| ENSG00000125485 | DDX31 |
| ENSG00000070778 | PTPN21 |
| ENSG00000126001 | CEP250 |
| ENSG00000169249 | ZRSR2 |
| ENSG00000111011 | RSRC2 |
| ENSG00000139496 | NUPL1 |
| ENSG00000131746 | TNS4 |
| ENSG00000061936 | SFSWAP |
| ENSG00000196584 | XRCC2 |
| ENSG00000168286 | THAP11 |
| ENSG00000119787 | ATL2 |
| ENSG00000182446 | NPLOC4 |
| ENSG00000071462 | WBSCR22 |
| ENSG00000213397 | HAUS7 |
| ENSG00000178028 | DMAP1 |
| ENSG00000067596 | DHX8 |
| ENSG00000198015 | MRPL42 |
| ENSG00000133706 | LARS |
| ENSG00000149635 | OCSTAMP |
| ENSG00000117505 | DR1 |
| ENSG00000155868 | MED7 |
| ENSG00000129197 | RPAIN |
| ENSG00000065978 | YBX1 |
| ENSG00000260238 | PMF1-BGLAP |
| ENSG00000178988 | MRFAP1L1 |
| ENSG00000168005 | C11orf84 |
| ENSG00000162408 | NOL9 |
| ENSG00000140350 | ANP32A |
| ENSG00000261796 | ISY1-RAB43 |
| ENSG00000174405 | LIG4 |
| ENSG00000197414 | GOLGA6L1 |
| ENSG00000116062 | MSH6 |
| ENSG00000116906 | GNPAT |
| ENSG00000134597 | RBMX2 |
| ENSG00000071994 | PDCD2 |
| ENSG00000112742 | TTK |
| ENSG00000106636 | YKT6 |
| ENSG00000101773 | RBBP8 |
| ENSG00000103061 | SLC7A6OS |
| ENSG00000140259 | MFAP1 |
| ENSG00000197077 | KIAA1671 |
| ENSG00000204435 | CSNK2B |
| ENSG00000055130 | CUL1 |
| ENSG00000100209 | HSCB |
| ENSG00000113048 | MRPS27 |
| ENSG00000189403 | HMGB1 |
| ENSG00000173011 | TADA2B |
| ENSG00000169836 | TACR3 |
| ENSG00000133816 | MICAL2 |
| ENSG00000141452 | C18orf8 |
| ENSG00000006715 | VPS41 |
| ENSG00000136518 | ACTL6A |
| ENSG00000100297 | MCM5 |
| ENSG00000165898 | ISCA2 |
| ENSG00000156384 | SFR1 |
| ENSG00000145414 | NAF1 |
| ENSG00000101972 | STAG2 |
| ENSG00000112658 | SRF |
| ENSG00000162736 | NCSTN |
| ENSG00000103266 | STUB1 |
| ENSG00000008018 | PSMB1 |
| ENSG00000149506 | ZP1 |
| ENSG00000111530 | CAND1 |
| ENSG00000027001 | MIPEP |
| ENSG00000152266 | PTH |
| ENSG00000154174 | TOMM70A |
| ENSG00000164045 | CDC25A |
| ENSG00000164758 | MED30 |
| ENSG00000160401 | C9orf117 |
| ENSG00000155959 | VBP1 |
| ENSG00000105409 | ATP1A3 |
| ENSG00000175106 | TVP23C |
| ENSG00000185950 | IRS2 |
| ENSG00000149256 | TENM4 |
| ENSG00000116957 | TBCE |
| ENSG00000154719 | MRPL39 |
| ENSG00000105364 | MRPL4 |
| ENSG00000198218 | QRICH1 |
| ENSG00000013503 | POLR3B |
| ENSG00000126756 | UXT |
| ENSG00000184988 | TMEM106A |
| ENSG00000186432 | KPNA4 |
| ENSG00000156304 | SCAF4 |
| ENSG00000090565 | RAB11FIP3 |
| ENSG00000163508 | EOMES |
| ENSG00000147003 | TMEM27 |
| ENSG00000198730 | CTR9 |
| ENSG00000105321 | CCDC9 |
| ENSG00000120333 | MRPS14 |
| ENSG00000121680 | PEX16 |
| ENSG00000088205 | DDX18 |
| ENSG00000132432 | SEC61G |
| ENSG00000186329 | TMEM212 |
| ENSG00000094804 | CDC6 |
| ENSG00000169084 | DHRSX |
| ENSG00000107618 | RBP3 |
| ENSG00000146426 | TIAM2 |
| ENSG00000198925 | ATG9A |
| ENSG00000168242 | HIST1H2BI |
| ENSG00000254772 | EEF1G |
| ENSG00000090971 | NAT14 |
| ENSG00000144381 | HSPD1 |
| ENSG00000127774 | EMC6 |
| ENSG00000126259 | KIRREL2 |
| ENSG00000111364 | DDX55 |
| ENSG00000100749 | VRK1 |
| ENSG00000159063 | ALG8 |
| ENSG00000163795 | ZNF513 |
| ENSG00000068394 | GPKOW |
| ENSG00000112659 | CUL9 |
| ENSG00000187257 | RSBN1L |
| ENSG00000172167 | MTBP |
| ENSG00000176177 | ENTHD1 |
| ENSG00000166783 | KIAA0430 |
| ENSG00000165006 | UBAP1 |
| ENSG00000188958 | UTS2B |
| ENSG00000136247 | ZDHHC4 |
| ENSG00000196363 | WDR5 |
| ENSG00000116661 | FBXO2 |
| ENSG00000113013 | HSPA9 |
| ENSG00000090061 | CCNK |
| ENSG00000051596 | THOC3 |
| ENSG00000140534 | TICRR |
| ENSG00000100216 | TOMM22 |
| ENSG00000104613 | INTS10 |
| ENSG00000183474 | GTF2H2C |
| ENSG00000159128 | IFNGR2 |
| ENSG00000243725 | TTC4 |
| ENSG00000102898 | NUTF2 |
| ENSG00000170515 | PA2G4 |
| ENSG00000117036 | ETV3 |
| ENSG00000196262 | PPIA |
| ENSG00000153037 | SRP19 |
| ENSG00000135801 | TAF5L |
| ENSG00000119414 | PPP6C |
| ENSG00000141013 | GAS8 |
| ENSG00000113845 | TIMMDC1 |
| ENSG00000175826 | CTDNEP1 |
| ENSG00000117543 | DPH5 |
| ENSG00000204779 | FOXD4L5 |
| ENSG00000112249 | ASCC3 |
| ENSG00000152256 | PDK1 |
| ENSG00000169217 | CD2BP2 |
| ENSG00000166246 | C16orf71 |
| ENSG00000184164 | CRELD2 |
| ENSG00000107960 | OBFC1 |
| ENSG00000102384 | CENPI |
| ENSG00000079785 | DDX1 |
| ENSG00000133858 | ZFC3H1 |
| ENSG00000184110 | EIF3C |
| ENSG00000146700 | SRCRB4D |
| ENSG00000163380 | LMOD3 |
| ENSG00000116273 | PHF13 |
| ENSG00000178229 | ZNF543 |
| ENSG00000109475 | RPL34 |
| ENSG00000156469 | MTERFD1 |
| ENSG00000155827 | RNF20 |
| ENSG00000213741 | RPS29 |
| ENSG00000165792 | METTL17 |
| ENSG00000110844 | PRPF40B |
| ENSG00000100842 | EFS |
| ENSG00000087495 | PHACTR3 |
| ENSG00000126261 | UBA2 |
| ENSG00000136718 | IMP4 |
| ENSG00000091640 | SPAG7 |
| ENSG00000184886 | PIGW |
| ENSG00000184313 | MROH7 |
| ENSG00000163481 | RNF25 |
| ENSG00000137054 | POLR1E |
| ENSG00000213085 | CCDC19 |
| ENSG00000171858 | RPS21 |
| ENSG00000130822 | PNCK |
| ENSG00000145216 | FIP1L1 |
| ENSG00000147130 | ZMYM3 |
| ENSG00000008086 | CDKL5 |
| ENSG00000165282 | PIGO |
| ENSG00000038358 | EDC4 |
| ENSG00000134684 | YARS |
| ENSG00000153832 | FBXO36 |
| ENSG00000140006 | WDR89 |
| ENSG00000104643 | MTMR9 |
| ENSG00000151779 | NBAS |
| ENSG00000077348 | EXOSC5 |
| ENSG00000131043 | AAR2 |
| ENSG00000160193 | WDR4 |
| ENSG00000140691 | ARMC5 |
| ENSG00000141959 | PFKL |
| ENSG00000112053 | SLC26A8 |
| ENSG00000197111 | PCBP2 |
| ENSG00000145191 | EIF2B5 |
| ENSG00000140988 | RPS2 |
| ENSG00000181472 | ZBTB2 |

[0430] The gene symbols used in herein (including in Tables 3 and 4) are based on those found in the Human Gene Naming Committee (HGNC) which is searchable on the world-wide web at www.genenames.org. Ensembl IDs are provided for each gene symbol and are searchable world-wide web at www.ensembl.org.

[0431] The genes provided in Tables 3 and 4 are non-limiting examples of essential genes. Although additional essential genes will be apparent to the skilled artisan based on the knowledge in the art, the suitability of a particular gene for use according to the present disclosure can be determined, e.g., as discussed herein. For example, in some embodiments, a particular essential gene can be selected by analysis of potential off-target sites elsewhere in the genome. In some embodiments, only essential genes with one or more gRNA target sites that are unique in the human genome are selected for methods described herein. In some embodiments, only essential genes with one or more gRNA target sites that are found in only one other locus in the human genome are selected for methods described herein. In some embodiments, only essential genes with one or more gRNA target sites found in only two other loci in the human genome are selected for methods described herein.

### Gene Product of Interest

[0432] The methods, systems and cells of the present disclosure enable the integration of a gene of interest at an essential gene of a cell. The gene of interest can encode any gene product of interest. In certain embodiments, a gene product of interest comprises an antibody, an antigen, an enzyme, a growth factor, a receptor (e.g., cell surface, cytoplasmic, or nuclear), a hormone, a lymphokine, a cytokine, a chemokine, a reporter, a functional fragment of any of the above, or a combination of any of the above.

[0433] In some embodiments, sequence for a gene product of interest can include, but is not limited to, prokaryotic sequences, cDNA from eukaryotic mRNA, genomic DNA sequences from eukaryotic (e.g., mammalian) DNA, and synthetic DNA sequences. For example, a gene of interest may encode an miRNA, an shRNA, a native polypeptide (i.e. a polypeptide found in nature) or fragment thereof; a variant polypeptide (i.e. a mutant of the native polypeptide having less than 100% sequence identity with the native polypeptide) or fragment thereof; an engineered polypeptide or peptide fragment, a therapeutic peptide or polypeptide, an imaging marker, a selectable marker, a degradation signal, and the like.

[0434] In some embodiments, an exemplary gene product of interest is one that confers therapeutic value, e.g., a new therapeutic activity to the cell. In some embodiments, exemplary gene products of interest are polypeptides such as a chimeric antigen receptor (CAR) or antigen-binding fragment thereof, a T cell receptor or antigen binding fragment thereof, a non-naturally occurring variant of FcγRIII (CD16), interleukin 15 (IL-15), interleukin 15 receptor (IL-15R) or a variant thereof, interleukin 12 (IL-12), interleukin-12 receptor (IL-12R) or a variant thereof, human leukocyte antigen G (HLA-G), human leukocyte antigen E (HLA-E), leukocyte surface antigen cluster of differentiation CD47 (CD47), or any combination of two or more thereof. It is to be understood that the methods and cells of the present disclosure are not limited to any particular gene product of interest and that the selection of a gene product of interest will depend on the type of cell and ultimate use of the cells.

[0435] In some embodiments, a gene product of interest may be a cytokine. In some embodiments, expression of a cytokine from a modified cell generated using a method as described herein allows for localized dosing of the cytokine in vivo (e.g., within a subject in need thereof) and/or avoids a need to systemically administer a high-dose of the cytokine to a subject in need thereof (e.g., a lower dose of the cytokine may be administered). In some embodiments, the risk of dose-limiting toxicities associated with administering a cytokine is reduced while cytokine mediated cell functions are maintained. In some embodiments, to facilitate cell function without the need to additionally administer high-doses of soluble cytokines, a partial or full peptide of one or more of IL2, IL4, IL6, IL7, IL9, IL10, IL11, IL12, IL15, IL18, IL21, IFN-α, IFN-β and/or their respective receptor is introduced to the cell to enable cytokine signaling with or without the expression of the cytokine itself, thereby maintaining or improving cell growth, proliferation, expansion, and/or effector function with reduced risk of cytokine toxicities. In some embodiments, the introduced cytokine and/or its respective native or modified receptor for cytokine signaling are expressed on the cell surface. In some embodiments, the cytokine signaling is constitutively activated. In some embodiments, the activation of the cytokine signaling is inducible. In some embodiments, the activation of the cytokine signaling is transient and/or temporal. In some embodiments, a gene product if interest can be IL2, IL3, IL4, IL6, IL7, IL9, IL10, IL11, IL12, IL13, IL15, IL21, GM-CSF, IFN-a, IFN-b, IFN-g, erythropoietin, and/or the respective cytokine receptor. In some embodiments, a gene product of interest can be CCL3, TNFα, CCL23, IL2RB, IL12RB2, or IRF7.

[0436] In some embodiments, a gene product of interest can be a chemokine and/or the respective chemokine receptor. In some embodiments, a chemokine receptor can be, but is not limited to, CCR2, CCR5, CCR8, CX3C1, CX3CR1, CXCR1, CXCR2, CXCR3A, CXCR3B, or CXCR2. In some embodiments, a chemokine can be, but is not limited to, CCL7, CCL19, or CXL14.

[0437] As used herein, the term “chimeric antigen receptor” or “CAR” refers to a receptor protein that has been modified to give cells expressing the CAR the new ability to target a specific protein. Within the context of the disclosure, a cell modified to comprise a CAR or an antigen binding fragment may be used for immunotherapy to target and destroy cells associated with a disease or disorder, e.g., cancer cells. In some embodiments, the CAR can bind to any antigen of interest.

[0438] CARs of interest can include, but are not limited to, a CAR targeting mesothelin, EGFR, HER2 and/or MICA/B. To date, mesothelin-targeted CAR T-cell therapy has shown early evidence of efficacy in a phase I clinical trial of subjects having mesothelioma, non-small cell lung cancer, and breast cancer (NCT02414269). Similarly, CARs targeting EGFR, HER2 and MICA/B have shown promise in early studies (see, e.g., Li et al. (2018), Cell Death & Disease, 9(177); Han et al. (2018) Am. J. Cancer Res., 8(1):106-119; and Demoulin 2017) Future Oncology, 13(8); the entire contents of each of which are expressly incorporated herein by reference in their entireties).

[0439] CARs are well-known to those of ordinary skill in the art and include those described in, for example: WO13/063419 (mesothelin), WO15/164594 (EGFR), WO13/063419 (HER2), WO16/154585 (MICA and MICB), the entire contents of each of which are expressly incorporated herein by reference in their entireties. In some embodiments, a gene product of interest is any suitable CAR, NK cell specific CAR (NK-CAR), T cell specific CAR, or other binder that targets a cell, e.g., an NK cell, to a target cell, e.g., a cell associated with a disease or disorder, may be expressed in the modified cells provided herein. Exemplary CARs, and binders, include, but are not limited to, bi-specific antigen binding CARs, switchable CARs, dimerizable CARs, split CARs, multi-chain CARs, inducible CARs, CARs and binders that bind BCMA, androgen receptor, PSMA, PSCA, Muc1, HPV viral peptides (i.e., E7), EBV viral peptides, WT1, CEA, EGFR, EGFRVIII, IL 13Rα2, GD2, CA125, EpCAM, Muc16, carbonic anhydrase IX (CAIX), CCR1, CCR4, carcinoembryonic antigen (CEA), CD3, CD5, CD7, CD10, CD19, CD20, CD22, CD23, CD24, CD26, CD30, CD33, CD34, CD35, CD38⁺CD41, CD44, CD44V6, CD49f, CD56, CD70, CD92, CD99, CD123, CD133, CD135, CD148, CD150, CD261, CD362, CLEC12A, MDM2, CYP1B, livin, cyclin 1, NKp30, NKp46, DNAM1, NKp44, CA9, PD1, PDL1, an antigen of cytomegalovirus (CMV), epithelial glycoprotein-40 (EGP-40), GPRC5D, receptor tyrosine kinases erb-B2,3,4, EGFIR, ERBB folate binding protein (FBP), fetal acetylcholine receptor (AChR), folate receptor-a, ganglioside G3 (GD3) human Epidermal Growth Factor Receptor 2 (HER-2), human telomerase reverse transcriptase (hTERT), ICAM-1, Integrin B7, Interleukin-13 receptor subunit alpha-2 (IL-13Rα2), K-light chain, kinase insert domain receptor (KDR), Lewis A (CA19.9), Lewis Y (Le Y), L1 cell adhesion molecule (LI-CAM), LILRB2, melanoma antigen family A 1 (MAGE-A1), MICA/B, Mucin 16 (Muc-16), NKCSI, NKG2D ligands, c-Met, cancer-testis antigen NYESO-1, oncofetal antigen (h5T4), PRAME, prostate stem cell antigen (PSCA), PRAME prostate-specific membrane antigen (PSMA), tumor-associated glycoprotein 72 (TAG-72), TIM-3, TRBCI, TRBC2, vascular endothelial growth factor R2 (VEGF-R2), Wilms tumor protein (WT-1), a pathogen antigen, or any suitable combination thereof. Additional suitable CARs and binders for use in the modified cells provided herein will be apparent to those of skill in the art based on the present disclosure and the general knowledge in the art. Such additional suitable CARs include those described in FIG. 3 of Davies and Maher, Adoptive T-cell Immunotherapy of Cancer Using Chimeric Antigen Receptor-Grafted T Cells, Archivum Immunologiae et Therapiae Experimentalis 58(3): 165-78 (2010), the entire contents of which are incorporated herein by reference. Additional CARs suitable for methods described herein include: CD171-specific CARs (Park et al., Mol Ther (2007) 15(4):825-833), EGFRvIII-specific CARs (Morgan et al, Hum Gene Ther (2012) 23(10): 1043-1053), EGF-R-specific CARs (Kobold et al, J Natl Cancer Inst (2014) 10⁷(1):364), carbonic anhydrase K-specific CARs (Lamers et al., Biochem Soc Trans (2016) 44(3): 951-959), FR-a-specific CARs (Kershaw et al., Clin Cancer Res (2006) 12(20):6106-6015), HER2-specific CARs (Ahmed et al., J Clin Oncol (2015) 33(15)1688-1696; Nakazawa et al., Mol Ther (2011) 19(12):2133-2143; Ahmed et al., Mol Ther (2009) 17(10): 1779-1787; Luo et al., Cell Res (2016) 26(7):850-853; Morgan et al., Mol Ther (2010) 18(4):843-85 1; Grada et al., Mol Ther Nucleic Acids (2013) 9(2):32), CEA-specific CARs (Katz et al., Clin Cancer Res (2015) 21 (14):3149-3159), IL13Ra2-specific CARs (Brown et al., Clin Cancer Res (2015) 21(18):4062-4072), GD2-specific CARs (Louis et al., Blood (2011) 118(23):6050-6056; Caruana et al., Nat Med (2015) 21(5):524-529), ErbB2-specific CARs (Wilkie et al., J Clin Immunol (2012) 32(5): 1059-1070), VEGF-R-specific CARs (Chinnasamy et al., Cancer Res (2016) 22(2):436-447), FAP-specific CARs (Wang et al., Cancer Immunol Res (2014) 2(2): 154-166), MSLN-specific CARs (Moon et al., Clin Cancer Res (2011) 17(14):4719-30), CD19-specific CARs (Axicabtagene ciloleucel (Yescarta®) and Tisagenlecleucel (Kymriah®). See also, Li et al., J Hematol and Oncol (2018) 11(22), reviewing clinical trials of tumor-specific CARs. In some embodiments, a CAR is an anti-EGFR CAR. In some embodiments, a CAR is an anti-CD19 CAR. In some embodiments, a CAR is an anti-BCMA CAR. In some embodiments, a CAR is an anti-CD7 CAR.

[0440] As used herein, the term “CD16” refers to a receptor (FcγRIII) for the Fc portion of immunoglobulin G, and it is involved in the removal of antigen-antibody complexes from the circulation, as well as other antibody-dependent responses. In some embodiments, a CD16 protein is an hCD16 variant. In some embodiments an hCD16 variant is a high affinity F158V variant.

[0441] In some embodiments, a gene product of interest comprises a high affinity non-cleavable CD16 (hnCD16) or a variant thereof. In some embodiments, a high affinity non-cleavable CD16 or a variant thereof comprises at least any one of the followings: (a) F176V and S197P in ectodomain domain of CD16 (see e.g., Jing et al., Identification of an ADAM17 Cleavage Region in Human CD16 (FcγRIII) and the Engineering of a Non-Cleavable Version of the Receptor in NK Cells; PLOS One, 2015); (b) a full or partial ectodomain originated from CD64; (c) a non-native (or non-CD16) transmembrane domain; (d) a non-native (or non-CD16) intracellular domain; (e) a non-native (or nonCD16) signaling domain; (f) a non-native stimulatory domain; and (g) transmembrane, signaling, and stimulatory domains that are not originated from CD16, and are originated from a same or different polypeptide. In some embodiments, the non-native transmembrane domain is derived from CD3D, CD3E, CD3G, CD3s, CD4, CD5, CD5a, CD5b, CD27, CD2S, CD40, CDS4, CD166, 4-1BB, OX40, ICOS, ICAM-1, CTLA-4, PD-1, LAG-3, 2B4, BTLA, CD16, IL7, IL12, IL15, KIR2DL4, KIR2DS1, NKp30, NKp44, NKp46, NKG2C, NKG2D, or T cell receptor (TCR) polypeptide. In some embodiments, the non-native stimulatory domain is derived from CD27, CD2S, 4-1BB, OX40, ICOS, PD-1, LAG-3, 2B4, BTLA, DAP10, DAP12, CTLA-4, or NKG2D polypeptide. In some other embodiments, the non-native signaling domain is derived from CD3s, 2B4, DAP10, DAP12, DNAMI, CD137 (41BB), IL21, IL7, IL12, IL15, NKp30, NKp44, NKp46, NKG2C, or NKG2D polypeptide. In some particular embodiments of a hnCD16 variant, the non-native transmembrane domain is derived from NKG2D, the non-native stimulatory domain is derived from 2B4, and the non-native signaling domain is derived from CD3s. In some embodiments, a gene product of interest comprises a high affinity cleavable CD16 (hnCD16) or a variant thereof. In some embodiments, a high affinity cleavable CD16 or a variant thereof comprises at least F176V. In some embodiments, a high affinity cleavable CD16 or a variant thereof does not comprise an S197P amino acid substitution.

[0442] As used herein, the term “IL-15/IL15RA” or “Interleukin-15” (IL-15) refers to a cytokine with structural similarity to Interleukin-2 (IL-2). Like IL-2, IL-15 binds to and signals through a complex composed of IL-2/IL-15 receptor beta chain (CD122) and the common gamma chain (gamma-C, CD132). IL-15 is secreted by mononuclear phagocytes (and some other cells) following infection by virus(es). This cytokine induces cell proliferation of natural killer cells. IL-15 Receptor alpha (IL15RA) specifically binds IL-15 with very high affinity, and is capable of binding IL-15 independently of other subunits (see e.g., Mishra et al., Molecular pathways: Interleukin-15 signaling in health and in cancer, Clinical Cancer Research, 2014). It is suggested that this property allows IL-15 to be produced by one cell, endocytosed by another cell, and then presented to a third party cell. IL15RA is reported to enhance cell proliferation and expression of apoptosis inhibitor BCL2L1/BCL2-XL and BCL2. Exemplary sequences of IL-15 are provided in NG_029605.2, and exemplary sequences of IL-15RA are provided in NM_002189.4. In some embodiments, the IL-15R variant is a constitutively active IL-15R variant. In some embodiments, the constitutively active IL-15R variant is a fusion between IL-15R and an IL-15R agonist, e.g., an IL-15 protein or IL-15R-binding fragment thereof. In some embodiments, the IL-15R agonist is IL-15, or an IL-15R-binding variant thereof. Exemplary suitable IL-15R variants include, without limitation, those described, e.g., in Mortier E et al, 2006; The Journal of Biological Chemistry 2006 281: 1612-1619; or in Bessard-A et al., Mol Cancer Ther. 2009 September; 8(9):2736-45, the entire contents of each of which are incorporated by reference herein. In some embodiments, membrane bound trans-presentation of IL-15 is a more potent activation pathway than soluble IL-15 (see e.g., Imamura et al., Autonomous growth and increased cytotoxicity of natural killer cells expressing membrane-bound interleukin-15, Blood, 2014). In some embodiments, IL-15R expression comprises: IL15 and IL 15Ra expression using a self-cleaving peptide; a fusion protein of IL 15 and IL15Ra; an IL15/IL15Ra fusion protein with intracellular domain of IL 15Ra truncated; a fusion protein of IL 15 and membrane bound Sushi domain of IL 15Ra; a fusion protein of IL15 and IL15Rβ; a fusion protein of IL 15 and common receptor γC, wherein the common receptor γC is native or modified; and/or a homodimer of IL15Rβ.

[0443] As used herein, the term “IL-12” refers to interleukin-12, a cytokine that acts on T and natural killer cells. In some embodiments, a genetically engineered stem cell and/or progeny cell comprises a genetic modification that leads to expression of one or more of an interleukin 12 (IL12) pathway agonist, e.g., IL-12, interleukin 12 receptor (IL-12R) or a variant thereof (e.g., a constitutively active variant of IL-12R, e.g., an IL-12R fused to an IL-12R agonist (IL-12RA).

[0444] In some embodiments, the gene product of interest comprises a protein or polypeptide whose expression within a cell, e.g., a cell modified as described herein, enables the cell to inhibit or evade immune rejection after transplant or engraftment into a subject. In some embodiments, the gene product of interest is HLA-E, HLA-G, CTL4, CD47, or an associated ligand.

[0445] In some embodiments, the gene product of interest is a T cell receptor (TCR) or an antigen-binding fragment thereof, e.g., a recombinant TCR. In some embodiments, the recombinant TCR can bind to an antigen of interest, e.g., an antigen selected from, but not limited to, CD279, CD2, CD95, CD152, CD223CD272, TIM3, KIR, A2aR, SIRPa, CD200, CD200R, CD300, LPA5, NY-ESO, PD1, PDL1, or MAGE-A3/A6. In some embodiments, the TCR or antigen-binding fragment thereof can bind to a viral antigen, e.g., an antigen from hepatitis A, hepatitis B, hepatitis C (HCV), human papilloma virus (HPV) (e.g., HPV-16 (such as HPV-16 E6 or HPV-16 E7), HPV-18, HPV-31, HPV-33, or HPV-35), Epstein-Barr virus (EBV), human herpes virus 8 (HHV-8), human T-cell leukemia virus01 (HTLV-1), human T-cell leukemia virus-2 (HTLV-2) or a cytomegalovirus (CMV).

[0446] In some embodiments, the gene product of interest comprises a single-chain variable fragment that can bind to CD47, PD1, CTLA4, CD28, OX40, 4-1BB, and ligands thereof.

[0447] As used herein, the term “HLA-G” refers to the HLA non-classical class I heavy chain paralogues. This class I molecule is a heterodimer consisting of a heavy chain and a light chain (beta-2 microglobulin). The heavy chain is anchored in the membrane. HLA-G is expressed on fetal derived placental cells. HLA-G is a ligand for NK cell inhibitory receptor KIR2DL4, and therefore expression of this HLA by the trophoblast defends it against NK cell-mediated death. See e.g., Favier et al., Tolerogenic Function of Dimeric Forms of HLA-G Recombinant Proteins: A Comparative Study In Vivo PLOS One 2011, the entire contents of which are incorporated herein by reference. An exemplary sequence of HLA-G is set forth as NG_029039.1.

[0448] As used herein, the term “HLA-E” refers to the HLA class I histocompatibility antigen, alpha chain E, also sometimes referred to as MHC class I antigen E. The HLA-E protein in humans is encoded by the HLA-E gene. The human HLA-E is a non-classical MHC class I molecule that is characterized by a limited polymorphism and a lower cell surface expression than its classical paralogues. This class I molecule is a heterodimer consisting of a heavy chain and a light chain (beta-2 microglobulin). The heavy chain is anchored in the membrane. HLA-E binds a restricted subset of peptides derived from the leader peptides of other class I molecules. HLA-E expressing cells escape allogeneic responses and lysis by NK cells. See e.g., Geornalusse-G et al., Nature Biotechnology 2017 35(8), the entire contents of which are incorporated herein by reference. Exemplary sequences of the HLA-E protein are provided in NM_005516.6.

[0449] As used herein, the term “CD47,” also sometimes referred to as “integrin associated protein” (IAP), refers to a transmembrane protein that in humans is encoded by the CD47 gene. CD47 belongs to the immunoglobulin superfamily, partners with membrane integrins, and also binds the ligands thrombospondin-1 (TSP-1) and signal-regulatory protein alpha (SIRPa). CD47 acts as a signal to macrophages that allows CD47-expressing cells to escape macrophage attack. See, e.g., Deuse-T, et al., Nature Biotechnology 2019 37: 252-258, the entire contents of which are incorporated herein by reference.

[0450] In some embodiments, a gene product of interest comprises a chimeric switch receptor (see e.g., WO2018094244A1—TGFBeta Signal Converter; Ankri et al., Human T cells Engineered to express a programmed death 1/28 costimulatory retargeting molecule display enhanced antitumor activity, The Journal of Immunology, Oct. 15, 2013, 191; Roth et al., Pooled knockin targeting for genome engineering of cellular immunotherapies, Cell. 2020 Apr. 30; 181(3):728-744.e21; and Boyerinas et al., A Novel TGF-β2/Interleukin Receptor Signal Conversion Platform That Protects CAR/TCR T Cells from TGF-β2-Mediated Immune Suppression and Induces T Cell Supportive Signaling Networks, Blood, 2017). In some embodiments, chimeric switch receptors are engineered cell-surface receptors comprising an extracellular domain from an endogenous cell-surface receptor and a heterologous intracellular signaling domain, such that ligand recognition by the extracellular domain results in activation of a different signaling cascade than that activated by the wild type form of the cell-surface receptor. In some embodiments, a chimeric switch receptor comprises an extracellular domain of an inhibitory cell-surface receptor fused to an intracellular domain that leads to the transmission of an activating signal rather than the inhibitory signal normally transduced by the inhibitory cell-surface receptor. In some embodiments, extracellular domains derived from cell-surface receptors known to inhibit immune effector cell activation can be fused to activating intracellular domains. In such an embodiment, engagement of the corresponding ligand may then activate signaling cascades that increase, rather than inhibit, the activation of the immune effector cell. For example, in some embodiments, a gene product of interest is a PD1-CD28 switch receptor, wherein the extracellular domain of PD1 is fused to the intracellular signaling domain of CD28 (See e.g., Liu et al., Cancer Res 76:6 (2016), 1578-1590 and Moon et al., Molecular Therapy 22 (2014), S201). In some embodiments, encoding gene product of interest is or comprises the extracellular domain of CD200R and the intracellular signaling domain of CD28 (See Oda et al., Blood 130:22 (2017), 2410-2419).

[0451] In some embodiments, a gene product of interest is a reporter gene (e.g., GFP, mCherry, etc.). In some embodiments, a reporter gene is utilized to confirm the suitability of a knock-in cassette's expression capacity. In certain embodiments, a gene product of interest may be a colored or fluorescent protein such as: blue/UV proteins, e.g. TagBFP, mTagBFP2, Azurite, EBFP2, mKalamal, Sirius, Sapphire, T-Sapphire; cyan proteins, e.g. ECFP, Cerulean, SCFP3A, m Turquoise, mTurquoise2, monomeric Midoriishi-Cyan, TagCFP, mTFPl; green proteins, e.g. EGFP, Emerald, Superfolder GFP, Monomeric Azami Green, TagGFP2, mUKG, m Wasabi, Clover, mNeonGreen; yellow proteins, e.g. EYFP, Citrine, Venus, SYFP2, TagYFP; orange proteins, e.g. Monomeric Kusabira-Orange, mKOK, mK02, mOrange, m0range2; red proteins, e.g. mRaspberry, mStrawberry, mTangerine, tdTomato, TagRFP, TagRFP-T, mApple, mRuby, mRuby2; far-red proteins, e.g. mPlum, HcRed-Tandem, mKate2, mNeptune, NirFP; near-IR proteins, e.g. TagRFP657, IFPl.4, iRFP; long stokes shift proteins, e.g. mKeima Red, LSS-mKatel, LSS-mKate2, mBeRFP; photoactivatible proteins, e.g. PA-GFP, PAmCherryl, PATagRFP; photoconvertible proteins, e.g. Kaede (green), Kaede (red), KikGRI (green), KikGR1 (red), PS-CFP2, PS-CFP2, mEos2 (green), mEos2 (red), mEos3.2 (green), mEos3.2 (red), PSmOrange, PSmOrange, photoswitchable proteins, e.g. Dronpa, and combinations thereof.

[0452] In some embodiments, a gene of interest provided herein can optionally include a sequence encoding a destabilizing domain (“a destabilizing sequence”) for temporal and/or spatial control of protein expression. Non-limiting examples of destabilizing sequences include sequences encoding a FK506 sequence, a dihydrofolate reductase (DHFR) sequence, or other exemplary destabilizing sequences.

[0453] In the absence of a stabilizing ligand, a protein sequence operatively linked to a destabilizing sequence is degraded by ubiquitination. In contrast, in the presence of a stabilizing ligand, protein degradation is inhibited, thereby allowing the protein sequence operatively linked to the destabilizing sequence to be actively expressed. As a positive control for stabilization of protein expression, protein expression can be detected by conventional means, including enzymatic, radiographic, colorimetric, fluorescence, or other spectrographic assays; fluorescent activating cell sorting (FACS) assays; immunological assays (e.g., enzyme linked immunosorbent assay (ELISA), radioimmunoassay (RIA), and immunohistochemistry).

[0454] Additional examples of destabilizing sequences are known in the art. In some embodiments, the destabilizing sequence is a FK506- and rapamycin-binding protein (FKBP12) sequence, and the stabilizing ligand is Shield-1 (Shld1) (Banaszynski et al. (2012) Cell 126(5): 995-1004, which is incorporated in its entirety herein by reference). In some embodiments, a destabilizing sequence is a DHFR sequence, and a stabilizing ligand is trimethoprim (TMP) (Iwamoto et al. (2010) Chem Biol 17:981-988, which is incorporated in its entirety herein by reference). In some embodiments, a destabilizing domain is small molecule-assisted shutoff (SMASh), where a constitutive degron with a protease and its corresponding cleavage site derived from hepatitis C virus are combined. In some embodiments, a destabilizing domain comprises a HaloTag system, dTag system, and/or nanobody (see e.g., Luh et al., Prey for the proteasome: targeted protein degradation—a medicinal chemist's perspective; Angewandte Chemie, 2020).

[0455] In some embodiments, a destabilizing sequence can be used to temporally control a cell modified as described herein.

[0456] In some embodiments, a gene product of interest may be a suicide gene, (see e.g., Zarogoulidis et al., Suicide Gene Therapy for Cancer—Current Strategies; J Genet Syndr Gene Ther. 2013). In some embodiments, a suicide gene can use a gene-directed enzyme prodrug therapy (GDEPT) approach, a dimerization inducing approach, and/or therapeutic monoclonal antibody mediated approach. In some embodiments, a suicide gene is biologically inert, has an adequate bio-availability profile, an adequate bio-distribution profile, and can be characterized by intrinsic acceptable and/or absence of toxicity. In some embodiments, a suicide gene codes for a protein able to convert, at a cellular level, a non-toxic prodrug into a toxic product. In some embodiments, a suicide gene may improve the safety profile of a cell described herein (see e.g., Greco et al., Improving the safety of cell therapy with the TK-suicide gene; Front Pharmacology. 2015; Jones et al., Improving the safety of cell therapy products by suicide gene transfer; Frontiers Pharmacology, 2014). In some embodiments, a suicide gene is a herpes simplex virus thymidine kinase (HSV-TK). In some embodiments, a suicide gene is a cytosine deaminase (CD). In some embodiments, a suicide gene is an apoptotic gene (e.g., a caspase). In some embodiments, a suicide gene is dimerization inducing, e.g., comprising an inducible FAS (iFAS) or inducible Caspase9 (iCasp9)/AP1903 system. In some embodiments, a suicide gene is a CD20 antigen, and cells expressing such an antigen can be eliminated by clinical-grade anti-CD20 antibody administration. In some embodiments, a suicide gene is a truncated human EGFR polypeptide (huEGFRt) which confers sensitivity to a pharmaceutical-grade anti-EGFR monoclonal antibody, e.g., cetuximab. In some embodiments a suicide gene is a c-myc tag, which confers sensitivity to pharmaceutical-grade anti-cmyc antibodies.

Exemplary DHFR destabilizing amino acid sequence
SEQ ID NO: 161
MISLIAALAVDYVIGMENAMPWNLPADLAWFKRNTLNKPVIMGRHTWESIGRPLPGRKNIILSS
QPSTDDRVTWVKSVDEAIAACGDVPEIMVIGGGRVIEQFLPKAQKLYLTHIDAEVEGDTHEPDY
EPDDWESVESEFHDADAQNSHSYCFEILERR
Exemplary DHFR destabilizing nucleotide sequence
SEQ ID NO: 162
GGTACCATCAGTCTGATTGCGGCGTTAGCGGTAGATTACGTTATCGGCATGGAAAACGCCATGC
CGTGGAACCTGCCTGCCGATCTCGCCTGGTTTAAACGCAACACCTTAAATAAACCCGTGATTAT
GGGCCGCCATACCTGGGAATCAATCGGTCGTCCGTTGCCAGGACGCAAAAATATTATCCTCAGC
AGTCAACCGAGTACGGACGATCGCGTAACGTGGGTGAAGTCGGTGGATGAAGCCATCGCGGCGT
GTGGTGACGTACCAGAAATCATGGTGATTGGCGGCGGTCGCGTTATTGAACAGTTCTTGCCAAA
AGCGCAAAAACTGTATCTGACGCATATCGACGCAGAAGTGGAAGGCGACACCCATTTCCCGGAT
TACGAGCCGGATGACTGGGAATCGGTATTCAGCGAATTCCACGATGCTGATGCGCAGAACTCTC
ACAGCTATTGCTTTGAGATTCTGGAGCGGCGATAA
Exemplary destabilizing domain
SEQ ID NO: 163
ATCAGTCTGATTGCGGCGTTAGCGGTAGATTACGTTATCGGCATGGAAAACGCCATGCCGTGGA
ACCTGCCTGCCGATCTCGCCTGGTTTAAACGCAACACCTTAAATAAACCCGTGATTATGGGCCG
CCATACCTGGGAATCAATCGGTCGTCCGTTGCCAGGACGCAAAAATATTATCCTCAGCAGTCAA
CCGAGTACGGACGATCGCGTAACGTGGGTGAAGTCGGTGGATGAAGCCATCGCGGCGTGTGGTG
ACGTACCAGAAATCATGGTGATTGGCGGCGGTCGCGTTATTGAACAGTTCTTGCCAAAAGCGCA
AAAACTGTATCTGACGCATATCGACGCAGAAGTGGAAGGCGACACCCATTTCCCGGATTACGAG
CCGGATGACTGGGAATCGGTATTCAGCGAATTCCACGATGCTGATGCGCAGAACTCTCACAGCT
ATTGCTTTGAGATTCTGGAGCGGCGA
Exemplary FKBP12 destabilizing peptide amino acid sequence
SEQ ID NO: 164
MGVEKQVIRPGNGPKPAPGQTVTVHCTGFGKDGDLSQKFWSTKDEGQKPFSFQIGKGAVIKGWD
EGVIGMQIGEVARLRCSSDYAYGAGGFPAWGIQPNSVLDFEIEVLSVQ

[0457] In some embodiments, a coding sequence for a single gene product of interest may be included in a knock-in cassette. In some embodiments, coding sequences for two gene products of interest may be included in a single knock-in cassette; in some embodiments, this may be referred to as a bicistronic or multicistronic construct. In some embodiments, coding sequences for more than two gene products of interest may be included in a single knock-in cassette; in some embodiments, this may be referred to as a multicistronic construct. In some embodiments, when more than one coding sequence for more than one gene product of interest is included in a knock-in cassette, these sequences may have a linker sequence connecting them. Linker sequences are generally known in the art, an exemplary linker sequence is identified in SEQ ID NO: 164000. In some embodiments, where more than one coding sequence for more than one gene product of interest is included in a knock-in cassette, these sequences may be connected by a linker sequence, an IRES, and/or 2A element.

[0458] In some embodiments, a polynucleotide encoding a gene product of interest comprises or consists of the sequence of any one of SEQ ID NOs: 162-163, 165-182, or 164000. In some embodiments, a polynucleotide encoding a gene product of interest comprises or consists of a sequence that is at least 85%, 90%, 95%, 96%, 97%, 98%, 99%, 99.1%, 99.2%, 99.3%, 99.4%, 99.5%, 99.6%, 99.7%, 99.8%, or 99.9% identical to any one of SEQ ID NOs: 162-163, 165-182, or 164000. In some embodiments, a polynucleotide encoding a gene product of interest comprises or consists of a functional variant of any one of SEQ ID NOs: 162-163, 165-182, or 164000. In some embodiments, a polynucleotide encoding a gene product of interest comprises or consists of a nucleotide sequence having 1, 2, 3, 4, 5, 6, 7, 8, 9, or 10 mutations (e.g., substitutions, insertions, and/or deletions) relative to any one of SEQ ID NOs: 162-163, 165-182, or 164000.

exemplary linker sequence
SEQ ID NO: 164000
TCTGGCGGAGGAAGCGGAGGCGGAGGATCTGGTGGTGGTGGATCTGGCGGCGGTGGTAGTGGCG
GAGGTTCTCTGCAA
exemplary CD16 knock-in cassette sequence
SEQ ID NO: 165
ATGTGGCAACTGCTGCTGCCTACAGCTCTGCTGCTTCTGGTGTCTGCCGGCATGAGAACCGAGG
ATCTGCCTAAGGCCGTGGTGTTCCTGGAACCTCAGTGGTACAGAGTGCTGGAAAAGGACAGCGT
GACCCTGAAGTGCCAGGGCGCCTATTCTCCCGAGGACAATAGCACCCAGTGGTTCCACAACGAG
AGCCTGATCAGCAGCCAGGCCAGCAGCTACTTTATCGATGCCGCCACCGTGGACGACAGCGGCG
AGTACAGATGCCAGACCAATCTGAGCACCCTGAGCGACCCTGTGCAGCTGGAAGTGCACATTGG
ATGGTTGCTGCTGCAAGCCCCTAGATGGGTGTTCAAAGAAGAGGACCCCATCCACCTGAGATGC
CACTCTTGGAAGAACACAGCCCTGCACAAAGTGACCTACCTGCAGAACGGCAAGGGCAGAAAGT
ACTTCCACCACAACAGCGACTTCTACATCCCCAAGGCCACACTGAAGGACTCCGGCTCCTACTT
CTGCAGAGGCCTGGTCGGCAGCAAGAACGTGTCCAGCGAGACAGTGAACATCACCATCACACAG
GGCCTCGCCGTGTCTACCATCAGCAGCTTTTTCCCACCTGGCTATCAGGTGTCCTTCTGCCTGG
TCATGGTGCTGCTGTTCGCCGTGGATACCGGCCTGTACTTCAGCGTCAAGACCAACATCCGGTC
CAGCACCAGAGACTGGAAGGACCACAAGTTCAAGTGGCGGAAGGACCCTCAGGACAAGTAA
exemplary CD16 knock-in cassette sequence
SEQ ID NO: 166
ATGTGGCAGCTGTTGCTGCCGACAGCCCTCCTGTTGCTGGTCTCCGCTGGCATGAGAACCGAGG
ATCTGCCTAAGGCCGTGGTGTTCCTGGAACCTCAGTGGTACAGAGTGCTGGAAAAGGACAGCGT
GACCCTGAAGTGCCAGGGCGCCTATTCTCCCGAGGACAATAGCACCCAGTGGTTCCACAACGAG
AGCCTGATCAGCAGCCAGGCCAGCAGCTACTTTATCGATGCCGCCACCGTGGACGACAGCGGCG
AGTACAGATGCCAGACCAATCTGAGCACCCTGAGCGACCCTGTGCAGCTGGAAGTGCACATTGG
ATGGTTGCTGCTGCAAGCCCCTAGATGGGTGTTCAAAGAAGAGGACCCCATCCACCTGAGATGC
CACTCTTGGAAGAACACAGCCCTGCACAAAGTGACCTACCTGCAGAACGGCAAGGGCAGAAAGT
ACTTCCACCACAACAGCGACTTCTACATCCCCAAGGCCACACTGAAGGACTCCGGCTCCTACTT
CTGCAGAGGCCTGGTCGGCAGCAAGAACGTGTCCAGCGAGACAGTGAACATCACCATCACACAG
GGCCTCGCCGTGTCTACCATCAGCAGCTTTTTCCCACCTGGCTATCAGGTGTCCTTCTGCCTGG
TCATGGTGCTGCTGTTCGCCGTGGATACCGGCCTGTACTTCAGCGTCAAGACCAACATCCGGTC
CAGCACCAGAGACTGGAAGGACCACAAGTTCAAGTGGCGGAAGGACCCTCAGGACAAG
exemplary CD47 knock-in cassette sequence
SEQ ID NO: 167
ATGTGGCCCCTGGTAGCGGCGCTGTTGCTGGGCTCGGCGTGCTGCGGATCAGCTCAGCTACTAT
TTAATAAAACAAAATCTGTAGAATTCACGTTTTGTAATGACACTGTCGTCATTCCATGCTTTGT
TACTAATATGGAGGCACAAAACACTACTGAAGTATACGTAAAGTGGAAATTTAAAGGAAGAGAT
ATTTACACCTTTGATGGAGCTCTAAACAAGTCCACTGTCCCCACTGACTTTAGTAGTGCAAAAA
TTGAAGTCTCACAATTACTAAAAGGAGATGCCTCTTTGAAGATGGATAAGAGTGATGCTGTCTC
ACACACAGGAAACTACACTTGTGAAGTAACAGAATTAACCAGAGAAGGTGAAACGATCATCGAG
CTAAAATATCGTGTTGTTTCATGGTTTTCTCCAAATGAAAATATTCTTATTGTTATTTTCCCAA
TTTTTGCTATACTCCTGTTCTGGGGACAGTTTGGTATTAAAACACTTAAATATAGATCCGGTGG
TATGGATGAGAAAACAATTGCTTTACTTGTTGCTGGACTAGTGATCACTGTCATTGTCATTGTT
GGAGCCATTCTTTTCGTCCCAGGTGAATATTCATTAAAGAATGCTACTGGCCTTGGTTTAATTG
TGACTTCTACAGGGATATTAATATTACTTCACTACTATGTGTTTAGTACAGCGATTGGATTAAC
CTCCTTCGTCATTGCCATATTGGTTATTCAGGTGATAGCCTATATCCTCGCTGTGGTTGGACTG
AGTCTCTGTATTGCGGCGTGTATACCAATGCATGGCCCTCTTCTGATTTCAGGTTTGAGTATCT
TAGCTCTAGCACAATTACTTGGACTAGTTTATATGAAATTTGTGGCTTCCAATCAGAAGACTAT
ACAACCTCCTAGGAAAGCTGTAGAGGAACCCCTTAATGCATTCAAAGAATCAAAAGGAATGATG
AATGATGAATGA
exemplary IL 15 knock-in cassette sequence
SEQ ID NO: 168
AATTGGGTCAACGTGATCAGCGACCTGAAGAAGATCGAGGACCTGATCCAGAGCATGCACATCG
ACGCCACACTGTACACCGAGTCCGATGTGCACCCTAGCTGCAAAGTGACCGCCATGAAGTGCTT
TCTGCTGGAACTGCAAGTGATCAGCCTGGAAAGCGGCGACGCCAGCATCCACGATACCGTGGAA
AACCTGATCATCCTGGCCAACAACAGCCTGAGCAGCAACGGCAATGTGACCGAGAGCGGCTGCA
AAGAGTGCGAGGAACTGGAAGAGAAGAACATCAAAGAGTTCCTCCAGAGCTTCGTCCACATCGT
GCAGATGTTCATCAACACCAGC
exemplary IgE-IL15 knock-in cassette sequence
SEQ ID NO: 169
ATGGATTGGACCTGGATCCTGTTTCTGGTGGCCGCTGCCACAAGAGTGCACAGCAATTGGGTCA
ACGTGATCAGCGACCTGAAGAAGATCGAGGACCTGATCCAGAGCATGCACATCGACGCCACACT
GTACACCGAGTCCGATGTGCACCCTAGCTGCAAAGTGACCGCCATGAAGTGCTTTCTGCTGGAA
CTGCAAGTGATCAGCCTGGAAAGCGGCGACGCCAGCATCCACGATACCGTGGAAAACCTGATCA
TCCTGGCCAACAACAGCCTGAGCAGCAACGGCAATGTGACCGAGAGCGGCTGCAAAGAGTGCGA
GGAACTGGAAGAGAAGAACATCAAAGAGTTCCTCCAGAGCTTCGTCCACATCGTGCAGATGTTC
ATCAACACCAGC
exemplary IgE-IL15 pro-peptide cargo sequence
SEQ ID NO: 170
ATGGACTGGACCTGGATTCTGTTCCTGGTCGCGGCTGCAACGCGAGTCCATAGCGGTATCCATG
TTTTTATTCTTGGGTGTTTTTCTGCTGGGCTGCCTAAGACCGAGGCCAACTGGGTAAATGTCAT
CAGTGACCTCAAGAAAATAGAAGACCTTATACAAAGCATGCACATTGATGCTACTCTCTACACT
GAGTCAGATGTACATCCCTCATGCAAAGTGACGGCCATGAAATGTTTCCTCCTCGAACTTCAAG
TCATATCTCTGGAAAGTGGCGACGCGTCCATCCACGACACGGTCGAAAACCTGATAATACTCGC
TAATAATAGTCTCTCTTCAAATGGTAACGTAACCGAGTCAGGTTGCAAAGAGTGCGAAGAGTTG
GAAGAAAAAAACATAAAGGAGTTCCTGCAAAGTTTCGTGCACATTGTGCAGATGTTCATTAATA
CCTCT
exemplary IL15Rα cargo sequence
SEQ ID NO: 171
ATCACCTGTCCTCCACCTATGAGCGTGGAACACGCCGACATCTGGGTCAAGAGCTACAGCCTGT
ACAGCAGAGAGCGGTACATCTGCAACAGCGGCTTCAAGAGAAAGGCCGGCACAAGCAGCCTGAC
CGAGTGTGTGCTGAACAAGGCCACAAACGTGGCCCACTGGACCACACCTAGCCTGAAGTGCATC
AGAGATCCCGCTCTGGTTCATCAGAGGCCTGCCCCTCCATCTACAGTGACAACAGCTGGCGTGA
CCCCTCAGCCTGAGTCTCTGTCTCCATCTGGAAAAGAGCCTGCCGCCAGCTCTCCCAGCTCTAA
CAATACTGCTGCCACCACAGCCGCTATCGTGCCTGGATCTCAGCTGATGCCTAGCAAGAGCCCT
AGCACCGGCACAACAGAGATCAGCTCTCACGAGAGCAGCCACGGAACACCTTCTCAGACCACCG
CCAAGAATTGGGAGCTGACAGCCTCTGCCTCTCATCAGCCACCTGGCGTGTACCCACAGGGCCA
CTCTGATACAACAGTGGCCATCAGCACCAGCACCGTTCTGCTGTGTGGCCTGTCTGCTGTTAGC
CTGCTGGCCTGCTACCTGAAGTCTAGACAGACACCTCCTCTGGCCAGCGTGGAAATGGAAGCCA
TGGAAGCTCTGCCTGTCACATGGGGCACCAGCAGCAGAGATGAGGACCTCGAGAATTGCAGCCA
CCACCTG
exemplary mbIL-15 cargo sequence
SEQ ID NO: 172
ATGGATTGGACCTGGATCCTGTTTCTGGTGGCCGCTGCCACAAGAGTGCACAGCAATTGGGTCA
ACGTGATCAGCGACCTGAAGAAGATCGAGGACCTGATCCAGAGCATGCACATCGACGCCACACT
GTACACCGAGTCCGATGTGCACCCTAGCTGCAAAGTGACCGCCATGAAGTGCTTTCTGCTGGAA
CTGCAAGTGATCAGCCTGGAAAGCGGCGACGCCAGCATCCACGATACCGTGGAAAACCTGATCA
TCCTGGCCAACAACAGCCTGAGCAGCAACGGCAATGTGACCGAGAGCGGCTGCAAAGAGTGCGA
GGAACTGGAAGAGAAGAACATCAAAGAGTTCCTCCAGAGCTTCGTCCACATCGTGCAGATGTTC
ATCAACACCAGCTCTGGCGGAGGAAGCGGAGGCGGAGGATCTGGTGGTGGTGGATCTGGCGGCG
GTGGTAGTGGCGGAGGTTCTCTGCAAATCACCTGTCCTCCACCTATGAGCGTGGAACACGCCGA
CATCTGGGTCAAGAGCTACAGCCTGTACAGCAGAGAGCGGTACATCTGCAACAGCGGCTTCAAG
AGAAAGGCCGGCACAAGCAGCCTGACCGAGTGTGTGCTGAACAAGGCCACAAACGTGGCCCACT
GGACCACACCTAGCCTGAAGTGCATCAGAGATCCCGCTCTGGTTCATCAGAGGCCTGCCCCTCC
ATCTACAGTGACAACAGCTGGCGTGACCCCTCAGCCTGAGTCTCTGTCTCCATCTGGAAAAGAG
CCTGCCGCCAGCTCTCCCAGCTCTAACAATACTGCTGCCACCACAGCCGCTATCGTGCCTGGAT
CTCAGCTGATGCCTAGCAAGAGCCCTAGCACCGGCACAACAGAGATCAGCTCTCACGAGAGCAG
CCACGGAACACCTTCTCAGACCACCGCCAAGAATTGGGAGCTGACAGCCTCTGCCTCTCATCAG
CCACCTGGCGTGTACCCACAGGGCCACTCTGATACAACAGTGGCCATCAGCACCAGCACCGTTC
TGCTGTGTGGCCTGTCTGCTGTTAGCCTGCTGGCCTGCTACCTGAAGTCTAGACAGACACCTCC
TCTGGCCAGCGTGGAAATGGAAGCCATGGAAGCTCTGCCTGTCACATGGGGCACCAGCAGCAGA
GATGAGGACCTCGAGAATTGCAGCCACCACCTG
exemplary mbIL-15 cargo sequence
SEQ ID NO: 173
ATGGACTGGACCTGGATTCTGTTCCTGGTCGCGGCTGCAACGCGAGTCCATAGCGGTATCCATG
TTTTTATTCTTGGGTGTTTTTCTGCTGGGCTGCCTAAGACCGAGGCCAACTGGGTAAATGTCAT
CAGTGACCTCAAGAAAATAGAAGACCTTATACAAAGCATGCACATTGATGCTACTCTCTACACT
GAGTCAGATGTACATCCCTCATGCAAAGTGACGGCCATGAAATGTTTCCTCCTCGAACTTCAAG
TCATATCTCTGGAAAGTGGCGACGCGTCCATCCACGACACGGTCGAAAACCTGATAATACTCGC
TAATAATAGTCTCTCTTCAAATGGTAACGTAACCGAGTCAGGTTGCAAAGAGTGCGAAGAGTTG
GAAGAAAAAAACATAAAGGAGTTCCTGCAAAGTTTCGTGCACATTGTGCAGATGTTCATTAATA
CCTCTAGCGGCGGAGGATCAGGTGGCGGTGGAAGCGGAGGTGGAGGCTCCGGTGGAGGAGGTAG
TGGCGGAGGTTCTCTTCAAATAACTTGTCCTCCACCGATGTCCGTAGAACATGCGGATATTTGG
GTAAAATCCTATAGCTTGTACAGCCGAGAGCGGTATATCTGCAACAGCGGCTTCAAGCGGAAGG
CCGGCACAAGCAGCCTGACCGAGTGCGTGCTGAACAAGGCCACCAACGTGGCCCACTGGACCAC
CCCTAGCCTGAAGTGCATCAGAGATCCCGCCCTGGTGCATCAGCGGCCTGCCCCTCCAAGCACA
GTGACAACAGCTGGCGTGACCCCCCAGCCTGAGAGCCTGAGCCCTTCTGGAAAAGAGCCTGCCG
CCAGCAGCCCCAGCAGCAACAATACTGCCGCCACCACAGCCGCCATCGTGCCTGGATCTCAGCT
GATGCCCAGCAAGAGCCCTAGCACCGGCACCACCGAGATCAGCAGCCACGAGTCTAGCCACGGC
ACCCCATCTCAGACCACCGCCAAGAACTGGGAGCTGACAGCCAGCGCCTCTCACCAGCCTCCAG
GCGTGTACCCTCAGGGCCACAGCGATACCACAGTGGCCATCAGCACCTCCACCGTGCTGCTGTG
TGGACTGAGCGCCGTGTCACTGCTGGCCTGCTACCTGAAGTCCAGACAGACCCCTCCACTGGCC
AGCGTGGAAATGGAAGCCATGGAAGCACTGCCCGTGACCTGGGGCACCAGCTCCAGAGATGAGG
ATCTGGAAAACTGCTCCCACCACCTG
exemplary multicistronic CD16, mbIL-15 cargo sequence
SEQ ID NO: 174
ATGTGGCAGCTGTTGCTGCCGACAGCCCTCCTGTTGCTGGTCTCCGCTGGCATGAGAACCGAGG
ATCTGCCTAAGGCCGTGGTGTTCCTGGAACCTCAGTGGTACAGAGTGCTGGAAAAGGACAGCGT
GACCCTGAAGTGCCAGGGCGCCTATTCTCCCGAGGACAATAGCACCCAGTGGTTCCACAACGAG
AGCCTGATCAGCAGCCAGGCCAGCAGCTACTTTATCGATGCCGCCACCGTGGACGACAGCGGCG
AGTACAGATGCCAGACCAATCTGAGCACCCTGAGCGACCCTGTGCAGCTGGAAGTGCACATTGG
ATGGTTGCTGCTGCAAGCCCCTAGATGGGTGTTCAAAGAAGAGGACCCCATCCACCTGAGATGC
CACTCTTGGAAGAACACAGCCCTGCACAAAGTGACCTACCTGCAGAACGGCAAGGGCAGAAAGT
ACTTCCACCACAACAGCGACTTCTACATCCCCAAGGCCACACTGAAGGACTCCGGCTCCTACTT
CTGCAGAGGCCTGGTCGGCAGCAAGAACGTGTCCAGCGAGACAGTGAACATCACCATCACACAG
GGCCTCGCCGTGTCTACCATCAGCAGCTTTTTCCCACCTGGCTATCAGGTGTCCTTCTGCCTGG
TCATGGTGCTGCTGTTCGCCGTGGATACCGGCCTGTACTTCAGCGTCAAGACCAACATCCGGTC
CAGCACCAGAGACTGGAAGGACCACAAGTTCAAGTGGCGGAAGGACCCTCAGGACAAGGGAAGC
GGAGCCACAAACTTCTCTCTGCTGAAGCAGGCAGGAGATGTTGAAGAAAACCCTGGACCTATGG
ATTGGACCTGGATCCTGTTTCTGGTGGCCGCTGCCACAAGAGTGCACAGCAATTGGGTCAACGT
GATCAGCGACCTGAAGAAGATCGAGGACCTGATCCAGAGCATGCACATCGACGCCACACTGTAC
ACCGAGTCCGATGTGCACCCTAGCTGCAAAGTGACCGCCATGAAGTGCTTTCTGCTGGAACTGC
AAGTGATCAGCCTGGAAAGCGGCGACGCCAGCATCCACGATACCGTGGAAAACCTGATCATCCT
GGCCAACAACAGCCTGAGCAGCAACGGCAATGTGACCGAGAGCGGCTGCAAAGAGTGCGAGGAA
CTGGAAGAGAAGAACATCAAAGAGTTCCTCCAGAGCTTCGTCCACATCGTGCAGATGTTCATCA
ACACCAGCTCTGGCGGAGGAAGCGGAGGCGGAGGATCTGGTGGTGGTGGATCTGGCGGCGGTGG
TAGTGGCGGAGGTTCTCTGCAAATCACCTGTCCTCCACCTATGAGCGTGGAACACGCCGACATC
TGGGTCAAGAGCTACAGCCTGTACAGCAGAGAGCGGTACATCTGCAACAGCGGCTTCAAGAGAA
AGGCCGGCACAAGCAGCCTGACCGAGTGTGTGCTGAACAAGGCCACAAACGTGGCCCACTGGAC
CACACCTAGCCTGAAGTGCATCAGAGATCCCGCTCTGGTTCATCAGAGGCCTGCCCCTCCATCT
ACAGTGACAACAGCTGGCGTGACCCCTCAGCCTGAGTCTCTGTCTCCATCTGGAAAAGAGCCTG
CCGCCAGCTCTCCCAGCTCTAACAATACTGCTGCCACCACAGCCGCTATCGTGCCTGGATCTCA
GCTGATGCCTAGCAAGAGCCCTAGCACCGGCACAACAGAGATCAGCTCTCACGAGAGCAGCCAC
GGAACACCTTCTCAGACCACCGCCAAGAATTGGGAGCTGACAGCCTCTGCCTCTCATCAGCCAC
CTGGCGTGTACCCACAGGGCCACTCTGATACAACAGTGGCCATCAGCACCAGCACCGTTCTGCT
GTGTGGCCTGTCTGCTGTTAGCCTGCTGGCCTGCTACCTGAAGTCTAGACAGACACCTCCTCTG
GCCAGCGTGGAAATGGAAGCCATGGAAGCTCTGCCTGTCACATGGGGCACCAGCAGCAGAGATG
AGGACCTCGAGAATTGCAGCCACCACCTG
exemplary CD19 CAR cargo sequence
SEQ ID NO: 175
ATGCTTCTCCTGGTGACAAGCCTTCTGCTCTGTGAGTTACCACACCCAGCATTCCTCCTGATCC
CAGACATCCAGATGACACAGACTACATCCTCCCTGTCTGCCTCTCTGGGAGACAGAGTCACCAT
CAGTTGCAGGGCAAGTCAGGACATTAGTAAATATTTAAATTGGTATCAGCAGAAACCAGATGGA
ACTGTTAAACTCCTGATCTACCATACATCAAGATTACACTCAGGAGTCCCATCAAGGTTCAGTG
GCAGTGGGTCTGGAACAGATTATTCTCTCACCATTAGCAACCTGGAGCAAGAAGATATTGCCAC
TTACTTTTGCCAACAGGGTAATACGCTTCCGTACACGTTCGGAGGGGGGACTAAGTTGGAAATA
ACAGGCTCCACCTCTGGATCCGGCAAGCCCGGATCTGGCGAGGGATCCACCAAGGGCGAGGTGA
AACTGCAGGAGTCAGGACCTGGCCTGGTGGCGCCCTCACAGAGCCTGTCCGTCACATGCACTGT
CTCAGGGGTCTCATTACCCGACTATGGTGTAAGCTGGATTCGCCAGCCTCCACGAAAGGGTCTG
GAGTGGCTGGGAGTAATATGGGGTAGTGAAACCACATACTATAATTCAGCTCTCAAATCCAGAC
TGACCATCATCAAGGACAACTCCAAGAGCCAAGTTTTCTTAAAAATGAACAGTCTGCAAACTGA
TGACACAGCCATTTACTACTGTGCCAAACATTATTACTACGGTGGTAGCTATGCTATGGACTAC
TGGGGTCAAGGAACCTCAGTCACCGTCTCCTCAGCGGCCGCAATTGAAGTTATGTATCCTCCTC
CTTACCTAGACAATGAGAAGAGCAATGGAACCATTATCCATGTGAAAGGGAAACACCTTTGTCC
AAGTCCCCTATTTCCCGGACCTTCTAAGCCCTTTTGGGTGCTGGTGGTGGTTGGGGGAGTCCTG
GCTTGCTATAGCTTGCTAGTAACAGTGGCCTTTATTATTTTCTGGGTGAGGAGTAAGAGGAGCA
GGCTCCTGCACAGTGACTACATGAACATGACTCCCCGCCGCCCCGGGCCCACCCGCAAGCATTA
CCAGCCCTATGCCCCACCACGCGACTTCGCAGCCTATCGCTCCAGAGTGAAGTTCAGCAGGAGC
GCAGACGCCCCCGCGTACCAGCAGGGCCAGAACCAGCTCTATAACGAGCTCAATCTAGGACGAA
GAGAGGAGTACGATGTTTTGGACAAGAGACGTGGCCGGGACCCTGAGATGGGGGGAAAGCCGAG
AAGGAAGAACCCTCAGGAAGGCCTGTACAATGAACTGCAGAAAGATAAGATGGCGGAGGCCTAC
AGTGAGATTGGGATGAAAGGCGAGCGCCGGAGGGGCAAGGGGCACGATGGCCTTTACCAGGGTC
TCAGTACAGCCACCAAGGACACCTACGACGCCCTTCACATGCAGGCCCTGCCCCCTCGCTAA
exemplary EGFR CAR cargo sequence
SEQ ID NO: 176
ATGGCACTCCCCGTCACCGCCCTTCTCTTGCCCCTCGCCCTGCTGCTGCATGCTGCCAGGCCCA
TGGACGAAGTGCAGCTCGTGGAGTCCGGTGGAGGACTCGTCCAACCGGGCGGATCCCTTCGCTT
GTCCTGCGCCGCATCAGGCTTCAGCTTCACCAACTATGGCGTCCACTGGGTCAGACAGGCCCCC
GGAAAGGGACTGGAATGGGTGTCCGTGATCTGGAGCGGCGGGAACACCGACTACAACACCTCCG
TGAAGGGCCGGTTCACTATTAGCCGCGACAACTCCAAGAACACTCTGTACCTCCAAATGAACTC
CCTGAGGGCCGAAGATACTGCTGTGTACTATTGCGCGAGAGCCCTGACCTACTACGACTACGAG
TTCGCGTACTGGGGCCAGGGGACTCTCGTGACCGTGTCCAGCGGTGGTGGAGGTTCCGGAGGCG
GAGGTTCTGGTGGCGGGGGATCAGAAATCGTGCTGACTCAGTCCCCTGCGACCTTGTCCCTGAG
CCCTGGAGAACGGGCCACCCTGAGCTGTAGAGCCAGCCAGAGCATCGGGACAAATATTCACTGG
TACCAGCAGAAACCCGGACAAGCACCACGGCTGCTGATCTACTACGCCTCCGAGTCGATTTCCG
GAATCCCGGCTCGCTTTTCGGGGTCTGGATCGGGAACGGACTTCACTCTGACCATCTCGTCGCT
GGAACCCGAGGATTTCGCCGTGTACTACTGCCAACAGAACAACAATTGGCCGACCACGTTCGGC
CAGGGCACCAAGCTCGAGATTAAGGGATCACTGGAAGCGGCCGCAACCACAACACCTGCTCCAA
GGCCCCCCACACCCGCTCCAACTATAGCCAGCCAACCATTGAGCCTCAGACCTGAAGCTTGCAG
GCCCGCAGCAGGAGGCGCCGTCCATACGCGAGGCCTGGACTTCGCGTGTGATATTTATATTTGG
GCCCCTTTGGCCGGAACATGTGGGGTGTTGCTTCTCTCCCTTGTGATCACTCTGTATTGTAAGC
GCGGGAGAAAGAAGCTCCTGTACATCTTCAAGCAGCCTTTTATGCGACCTGTGCAAACCACTCA
GGAAGAAGATGGGTGTTCATGCCGCTTCCCCGAGGAGGAAGAAGGAGGGTGTGAACTGAGGGTG
AAATTTTCTAGAAGCGCCGATGCTCCCGCATATCAGCAGGGTCAGAATCAGCTCTACAATGAAT
TGAATCTCGGCAGGCGAGAAGAGTACGATGTTCTGGACAAGAGACGGGGCAGGGATCCCGAGAT
GGGGGGAAAGCCCCGGAGAAAAAATCCTCAGGAGGGGTTGTACAATGAGCTGCAGAAGGACAAG
ATGGCTGAAGCCTATAGCGAGATCGGAATGAAAGGCGAAAGACGCAGAGGCAAGGGGCATGACG
GTCTGTACCAGGGTCTCTCTACAGCCACCAAGGACACTTATGATGCGTTGCATATGCAAGCCTT
GCCACCCCGCTAA
exemplary GFP cargo sequence
SEQ ID NO: 177
ATGGTGAGCAAGGGCGAGGAGCTGTTCACCGGGGTGGTGCCCATCCTGGTCGAGCTGGACGGCG
ACGTAAACGGCCACAAGTTCAGCGTGTCCGGCGAGGGCGAGGGCGATGCCACCTACGGCAAGCT
GACCCTGAAGTTCATCTGCACCACCGGCAAGCTGCCCGTGCCCTGGCCCACCCTCGTGACCACC
CTGACCTACGGCGTGCAGTGCTTCAGCCGCTACCCCGACCACATGAAGCAGCACGACTTCTTCA
AGTCCGCCATGCCCGAAGGCTACGTCCAGGAGCGCACCATCTTCTTCAAGGACGACGGCAACTA
CAAGACCCGCGCCGAGGTGAAGTTCGAGGGCGACACCCTGGTGAACCGCATCGAGCTGAAGGGC
ATCGACTTCAAGGAGGACGGCAACATCCTGGGGCACAAGCTGGAGTACAACTACAACAGCCACA
ACGTCTATATCATGGCCGACAAGCAGAAGAACGGCATCAAGGTGAACTTCAAGATCCGCCACAA
CATCGAGGACGGCAGCGTGCAGCTCGCCGACCACTACCAGCAGAACACCCCCATCGGCGACGGC
CCCGTGCTGCTGCCCGACAACCACTACCTGAGCACCCAGTCCGCCCTGAGCAAAGACCCCAACG
AGAAGCGCGATCACATGGTCCTGCTGGAGTTCGTGACCGCCGCCGGGATCACTCTCGGCATGGA
CGAGCTGTACAAGTGA
exemplary CXCR1 cargo sequence
SEQ ID NO: 178
ATGTCAAATATTACAGATCCACAGATGTGGGATTTTGATGATCTAAATTTCACTGGCATGCCAC
CTGCAGATGAAGATTACAGCCCCTGTATGCTAGAAACTGAGACACTCAACAAGTATGTTGTGAT
CATCGCCTATGCCCTAGTGTTCCTGCTGAGCCTGCTGGGAAACTCCCTGGTGATGCTGGTCATC
TTATACAGCAGGGTCGGCCGCTCCGTCACTGATGTCTACCTGCTGAACCTGGCCTTGGCCGACC
TACTCTTTGCCCTGACCTTGCCCATCTGGGCCGCCTCCAAGGTGAATGGCTGGATTTTTGGCAC
ATTCCTGTGCAAGGTGGTCTCACTCCTGAAGGAAGTCAACTTCTACAGTGGCATCCTGCTGTTG
GCCTGCATCAGTGTGGACCGTTACCTGGCCATTGTCCATGCCACACGCACACTGACCCAGAAGC
GTCACTTGGTCAAGTTTGTTTGTCTTGGCTGCTGGGGACTGTCTATGAATCTGTCCCTGCCCTT
CTTCCTTTTCCGCCAGGCTTACCATCCAAACAATTCCAGTCCAGTTTGCTATGAGGTCCTGGGA
AATGACACAGCAAAATGGCGGATGGTGTTGCGGATCCTGCCTCACACCTTTGGCTTCATCGTGC
CGCTGTTTGTCATGCTGTTCTGCTATGGATTCACCCTGCGTACACTGTTTAAGGCCCACATGGG
GCAGAAGCACCGAGCCATGAGGGTCATCTTTGCTGTCGTCCTCATCTTCCTGCTTTGCTGGCTG
CCCTACAACCTGGTCCTGCTGGCAGACACCCTCATGAGGACCCAGGTGATCCAGGAGAGCTGTG
AGCGCCGCAACAACATCGGCCGGGCCCTGGATGCCACTGAGATTCTGGGATTTCTCCATAGCTG
CCTCAACCCCATCATCTACGCCTTCATCGGCCAAAATTTTCGCCATGGATTCCTCAAGATCCTG
GCTATGCATGGCCTGGTCAGCAAGGAGTTCTTGGCACGTCATCGTGTTACCTCCTACACTTCTT
CGTCTGTCAATGTCTCTTCCAACCTCTGA
exemplary CXCR3B cargo sequence
SEQ ID NO: 179
ATGGAGTTGAGGAAGTACGGCCCTGGAAGACTGGCGGGGACAGTTATAGGAGGAGCTGCTCAGA
GTAAATCACAGACTAAATCAGACTCAATCACAAAAGAGTTCCTGCCAGGCCTTTACACAGCCCC
TTCCTCCCCGTTCCCGCCCTCACAGGTGAGTGACCACCAAGTGCTAAATGACGCCGAGGTTGCC
GCCCTCCTGGAGAACTTCAGCTCTTCCTATGACTATGGAGAAAACGAGAGTGACTCGTGCTGTA
CCTCCCCGCCCTGCCCACAGGACTTCAGCCTGAACTTCGACCGGGCCTTCCTGCCAGCCCTCTA
CAGCCTCCTCTTTCTGCTGGGGCTGCTGGGCAACGGCGCGGTGGCAGCCGTGCTGCTGAGCCGG
CGGACAGCCCTGAGCAGCACCGACACCTTCCTGCTCCACCTAGCTGTAGCAGACACGCTGCTGG
TGCTGACACTGCCGCTCTGGGCAGTGGACGCTGCCGTCCAGTGGGTCTTTGGCTCTGGCCTCTG
CAAAGTGGCAGGTGCCCTCTTCAACATCAACTTCTACGCAGGAGCCCTCCTGCTGGCCTGCATC
AGCTTTGACCGCTACCTGAACATAGTTCATGCCACCCAGCTCTACCGCCGGGGGCCCCCGGCCC
GCGTGACCCTCACCTGCCTGGCTGTCTGGGGGCTCTGCCTGCTTTTCGCCCTCCCAGACTTCAT
CTTCCTGTCGGCCCACCACGACGAGCGCCTCAACGCCACCCACTGCCAATACAACTTCCCACAG
GTGGGCCGCACGGCTCTGCGGGTGCTGCAGCTGGTGGCTGGCTTTCTGCTGCCCCTGCTGGTCA
TGGCCTACTGCTATGCCCACATCCTGGCCGTGCTGCTGGTTTCCAGGGGCCAGCGGCGCCTGCG
GGCCATGCGGCTGGTGGTGGTGGTCGTGGTGGCCTTTGCCCTCTGCTGGACCCCCTATCACCTG
GTGGTGCTGGTGGACATCCTCATGGACCTGGGCGCTTTGGCCCGCAACTGTGGCCGAGAAAGCA
GGGTAGACGTGGCCAAGTCGGTCACCTCAGGCCTGGGCTACATGCACTGCTGCCTCAACCCGCT
GCTCTATGCCTTTGTAGGGGTCAAGTTCCGGGAGCGGATGTGGATGCTGCTCTTGCGCCTGGGC
TGCCCCAACCAGAGAGGGCTCCAGAGGCAGCCATCGTCTTCCCGCCGGGATTCATCCTGGTCTG
AGACCTCAGAGGCCTCCTACTCGGGCTTGTGA
exemplary CXCR3A cargo sequence
SEQ ID NO: 180
ATGGTCCTTGAGGTGAGTGACCACCAAGTGCTAAATGACGCCGAGGTTGCCGCCCTCCTGGAGA
ACTTCAGCTCTTCCTATGACTATGGAGAAAACGAGAGTGACTCGTGCTGTACCTCCCCGCCCTG
CCCACAGGACTTCAGCCTGAACTTCGACCGGGCCTTCCTGCCAGCCCTCTACAGCCTCCTCTTT
CTGCTGGGGCTGCTGGGCAACGGCGCGGTGGCAGCCGTGCTGCTGAGCCGGCGGACAGCCCTGA
GCAGCACCGACACCTTCCTGCTCCACCTAGCTGTAGCAGACACGCTGCTGGTGCTGACACTGCC
GCTCTGGGCAGTGGACGCTGCCGTCCAGTGGGTCTTTGGCTCTGGCCTCTGCAAAGTGGCAGGT
GCCCTCTTCAACATCAACTTCTACGCAGGAGCCCTCCTGCTGGCCTGCATCAGCTTTGACCGCT
ACCTGAACATAGTTCATGCCACCCAGCTCTACCGCCGGGGGCCCCCGGCCCGCGTGACCCTCAC
CTGCCTGGCTGTCTGGGGGCTCTGCCTGCTTTTCGCCCTCCCAGACTTCATCTTCCTGTCGGCC
CACCACGACGAGCGCCTCAACGCCACCCACTGCCAATACAACTTCCCACAGGTGGGCCGCACGG
CTCTGCGGGTGCTGCAGCTGGTGGCTGGCTTTCTGCTGCCCCTGCTGGTCATGGCCTACTGCTA
TGCCCACATCCTGGCCGTGCTGCTGGTTTCCAGGGGCCAGCGGCGCCTGCGGGCCATGCGGCTG
GTGGTGGTGGTCGTGGTGGCCTTTGCCCTCTGCTGGACCCCCTATCACCTGGTGGTGCTGGTGG
ACATCCTCATGGACCTGGGCGCTTTGGCCCGCAACTGTGGCCGAGAAAGCAGGGTAGACGTGGC
CAAGTCGGTCACCTCAGGCCTGGGCTACATGCACTGCTGCCTCAACCCGCTGCTCTATGCCTTT
GTAGGGGTCAAGTTCCGGGAGCGGATGTGGATGCTGCTCTTGCGCCTGGGCTGCCCCAACCAGA
GAGGGCTCCAGAGGCAGCCATCGTCTTCCCGCCGGGATTCATCCTGGTCTGAGACCTCAGAGGC
CTCCTACTCGGGCTTGTGA
exemplary CCR5 cargo sequence
SEQ ID NO: 181
ATGGATTATCAAGTGTCAAGTCCAATCTATGACATCAATTATTATACATCGGAGCCCTGCCAAA
AAATCAATGTGAAGCAAATCGCAGCCCGCCTCCTGCCTCCGCTCTACTCACTGGTGTTCATCTT
TGGTTTTGTGGGCAACATGCTGGTCATCCTCATCCTGATAAACTGCAAAAGGCTGAAGAGCATG
ACTGACATCTACCTGCTCAACCTGGCCATCTCTGACCTGTTTTTCCTTCTTACTGTCCCCTTCT
GGGCTCACTATGCTGCCGCCCAGTGGGACTTTGGAAATACAATGTGTCAACTCTTGACAGGGCT
CTATTTTATAGGCTTCTTCTCTGGAATCTTCTTCATCATCCTCCTGACAATCGATAGGTACCTG
GCTGTCGTCCATGCTGTGTTTGCTTTAAAAGCCAGGACGGTCACCTTTGGGGTGGTGACAAGTG
TGATCACTTGGGTGGTGGCTGTGTTTGCGTCTCTCCCAGGAATCATCTTTACCAGATCTCAAAA
AGAAGGTCTTCATTACACCTGCAGCTCTCATTTTCCATACAGTCAGTATCAATTCTGGAAGAAT
TTCCAGACATTAAAGATAGTCATCTTGGGGCTGGTCCTGCCGCTGCTTGTCATGGTCATCTGCT
ACTCGGGAATCCTAAAAACTCTGCTTCGGTGTCGAAATGAGAAGAAGAGGCACAGGGCTGTGAG
GCTTATCTTCACCATCATGATTGTTTATTTTCTCTTCTGGGCTCCCTACAACATTGTCCTTCTC
CTGAACACCTTCCAGGAATTCTTTGGCCTGAATAATTGCAGTAGCTCTAACAGGTTGGACCAAG
CTATGCAGGTGACAGAGACTCTTGGGATGACGCACTGCTGCATCAACCCCATCATCTATGCCTT
TGTCGGGGAGAAGTTCAGAAACTACCTCTTAGTCTTCTTCCAAAAGCACATTGCCAAACGCTTC
TGCAAATGCTGTTCTATTTTCCAGCAAGAGGCTCCCGAGCGAGCAAGCTCAGTTTACACCCGAT
CCACTGGGGAGCAGGAAATATCTGTGGGCTTGTGA
exemplary CCR2 cargo sequence
SEQ ID NO: 182
ATGCTGTCCACATCTCGTTCTCGGTTTATCAGAAATACCAACGAGAGCGGTGAAGAAGTCACCA
CCTTTTTTGATTATGATTACGGTGCTCCCTGTCATAAATTTGACGTGAAGCAAATTGGGGCCCA
ACTCCTGCCTCCGCTCTACTCGCTGGTGTTCATCTTTGGTTTTGTGGGCAACATGCTGGTCGTC
CTCATCTTAATAAACTGCAAAAAGCTGAAGTGCTTGACTGACATTTACCTGCTCAACCTGGCCA
TCTCTGATCTGCTTTTTCTTATTACTCTCCCATTGTGGGCTCACTCTGCTGCAAATGAGTGGGT
CTTTGGGAATGCAATGTGCAAATTATTCACAGGGCTGTATCACATCGGTTATTTTGGCGGAATC
TTCTTCATCATCCTCCTGACAATCGATAGATACCTGGCTATTGTCCATGCTGTGTTTGCTTTAA
AAGCCAGGACGGTCACCTTTGGGGTGGTGACAAGTGTGATCACCTGGTTGGTGGCTGTGTTTGC
TTCTGTCCCAGGAATCATCTTTACTAAATGCCAGAAAGAAGATTCTGTTTATGTCTGTGGCCCT
TATTTTCCACGAGGATGGAATAATTTCCACACAATAATGAGGAACATTTTGGGGCTGGTCCTGC
CGCTGCTCATCATGGTCATCTGCTACTCGGGAATCCTGAAAACCCTGCTTCGGTGTCGAAACGA
GAAGAAGAGGCATAGGGCAGTGAGAGTCATCTTCACCATCATGATTGTTTACTTTCTCTTCTGG
ACTCCCTATAATATTGTCATTCTCCTGAACACCTTCCAGGAATTCTTCGGCCTGAGTAACTGTG
AAAGCACCAGTCAACTGGACCAAGCCACGCAGGTGACAGAGACTCTTGGGATGACTCACTGCTG
CATCAATCCCATCATCTATGCCTTCGTTGGGGAGAAGTTCAGAAGCCTTTTTCACATAGCTCTT
GGCTGTAGGATTGCCCCACTCCAAAAACCAGTGTGTGGAGGTCCAGGAGTGAGACCAGGAAAGA
ATGTGAAAGTGACTACACAAGGACTCCTCGATGGTCGTGGAAAAGGAAAGTCAATTGGCAGAGC
CCCTGAAGCCAGTCTTCAGGACAAAGAAGGAGCCTAG

[0459] In some embodiments, a gene product of interest comprises or consists of an amino acid sequence of any one of SEQ ID NOs: 161, 164, or 183-200. In some embodiments, a gene product of interest comprises or consists of an amino acid sequence that is at least 85%, 90%, 95%, 96%, 97%, 98%, 99%, 99.1%, 99.2%, 99.3%, 99.4%, 99.5%, 99.6%, 99.7%, 99.8%, or 99.9% identical to any one of SEQ ID NOs: 161, 164, or 183-200. In some embodiments, a gene product of interest comprises or consists of a functional variant of any one of SEQ ID NOs: 161, 164, or 183-200. In some embodiments, a gene product of interest comprises or consists of an amino acid sequence having 1, 2, 3, 4, 5, 6, 7, 8, 9, or 10 mutations (e.g., substitutions, insertions, and/or deletions) relative to any one of SEQ ID NOs: 161, 164, or 183-200.

exemplary linker amino acid sequence
SEQ ID NO: 183
SGGGSGGGGSGGGGSGGGGSGGGSLQ
exemplary CD16 amino acid sequence
SEQ ID NO: 184
MWQLLLPTALLLLVSAGMRTEDLPKAVVFLEPQWYRVLEKDSVTLKCQGAYSPEDNSTQWFHNE
SLISSQASSYFIDAATVDDSGEYRCQTNLSTLSDPVQLEVHIGWLLLQAPRWVFKEEDPIHLRC
HSWKNTALHKVTYLQNGKGRKYFHHNSDFYIPKATLKDSGSYFCRGLVGSKNVSSETVNITITQ
GLAVSTISSFFPPGYQVSFCLVMVLLFAVDTGLYFSVKTNIRSSTRDWKDHKFKWRKDPQDK
exemplary CD47 amino acid sequence
SEQ ID NO: 185
MWPLVAALLLGSACCGSAQLLENKTKSVEFTFCNDTVVIPCFVTNMEAQNTTEVYVKWKFKGRD
IYTFDGALNKSTVPTDFSSAKIEVSQLLKGDASLKMDKSDAVSHTGNYTCEVTELTREGETIIE
LKYRVVSWFSPNENILIVIFPIFAILLFWGQFGIKTLKYRSGGMDEKTIALLVAGLVITVIVIV
GAILFVPGEYSLKNATGLGLIVTSTGILILLHYYVFSTAIGLTSFVIAILVIQVIAYILAVVGL
SLCIAACIPMHGPLLISGLSILALAQLLGLVYMKFVASNQKTIQPPRKAVEEPLNAFKESKGMM
NDE
exemplary IL15 amino acid sequence
SEQ ID NO: 186
NWVNVISDLKKIEDLIQSMHIDATLYTESDVHPSCKVTAMKCFLLELQVISLESGDASIHDTVE
NLIILANNSLSSNGNVTESGCKECEELEEKNIKEFLQSFVHIVQMFINTS
exemplary IgE-IL15 amino acid sequence
SEQ ID NO: 187
MDWTWILFLVAAATRVHSNWVNVISDLKKIEDLIQSMHIDATLYTESDVHPSCKVTAMKCELLE
LQVISLESGDASIHDTVENLIILANNSLSSNGNVTESGCKECEELEEKNIKEFLQSFVHIVQMF
INTS
exemplary IgE-IL15 pro-peptide amino acid sequence
SEQ ID NO: 188
MDWTWILFLVAAATRVHSGIHVFILGCFSAGLPKTEANWVNVISDLKKIEDLIQSMHIDATLYT
ESDVHPSCKVTAMKCFLLELQVISLESGDASIHDTVENLIILANNSLSSNGNVTESGCKECEEL
EEKNIKEFLQSFVHIVQMFINTS
exemplary IL15Rα amino acid sequence
SEQ ID NO: 189
ITCPPPMSVEHADIWVKSYSLYSRERYICNSGFKRKAGTSSLTECVLNKATNVAHWTTPSLKCI
RDPALVHQRPAPPSTVTTAGVTPQPESLSPSGKEPAASSPSSNNTAATTAAIVPGSQLMPSKSP
STGTTEISSHESSHGTPSQTTAKNWELTASASHQPPGVYPQGHSDTTVAISTSTVLLCGLSAVS
LLACYLKSRQTPPLASVEMEAMEALPVTWGTSSRDEDLENCSHHL
exemplary mbIL-15 amino acid sequence
SEQ ID NO: 190
MDWTWILFLVAAATRVHSNWVNVISDLKKIEDLIQSMHIDATLYTESDVHPSCKVTAMKCELLE
LQVISLESGDASIHDTVENLIILANNSLSSNGNVTESGCKECEELEEKNIKEFLQSFVHIVQME
INTSSGGGSGGGGSGGGGSGGGGSGGGSLQITCPPPMSVEHADIWVKSYSLYSRERYICNSGFK
RKAGTSSLTECVLNKATNVAHWTTPSLKCIRDPALVHQRPAPPSTVTTAGVTPQPESLSPSGKE
PAASSPSSNNTAATTAAIVPGSQLMPSKSPSTGTTEISSHESSHGTPSQTTAKNWELTASASHQ
PPGVYPQGHSDTTVAISTSTVLLCGLSAVSLLACYLKSRQTPPLASVEMEAMEALPVTWGTSSR
DEDLENCSHHL
exemplary mbIL-15 amino acid sequence
SEQ ID NO: 191
MDWTWILFLVAAATRVHSGIHVFILGCFSAGLPKTEANWVNVISDLKKIEDLIQSMHIDATLYT
ESDVHPSCKVTAMKCFLLELQVISLESGDASIHDTVENLIILANNSLSSNGNVTESGCKECEEL
EEKNIKEFLQSFVHIVQMFINTSSGGGSGGGGSGGGGSGGGGSGGGSLQITCPPPMSVEHADIW
VKSYSLYSRERYICNSGFKRKAGTSSLTECVLNKATNVAHWTTPSLKCIRDPALVHQRPAPPST
VTTAGVTPQPESLSPSGKEPAASSPSSNNTAATTAAIVPGSQLMPSKSPSTGTTEISSHESSHG
TPSQTTAKNWELTASASHQPPGVYPQGHSDTTVAISTSTVLLCGLSAVSLLACYLKSRQTPPLA
SVEMEAMEALPVTWGTSSRDEDLENCSHHL
exemplary multicistronic CD16, mbIL-15 amino acid sequence
SEQ ID NO: 192
MWQLLLPTALLLLVSAGMRTEDLPKAVVFLEPQWYRVLEKDSVTLKCQGAYSPEDNSTQWFHNE
SLISSQASSYFIDAATVDDSGEYRCQTNLSTLSDPVQLEVHIGWLLLQAPRWVFKEEDPIHLRC
HSWKNTALHKVTYLQNGKGRKYFHHNSDFYIPKATLKDSGSYFCRGLVGSKNVSSETVNITITQ
GLAVSTISSFFPPGYQVSFCLVMVLLFAVDTGLYFSVKTNIRSSTRDWKDHKFKWRKDPQDKGS
GATNFSLLKQAGDVEENPGPMDWTWILFLVAAATRVHSNWVNVISDLKKIEDLIQSMHIDATLY
TESDVHPSCKVTAMKCFLLELQVISLESGDASIHDTVENLIILANNSLSSNGNVTESGCKECEE
LEEKNIKEFLQSFVHIVQMFINTSSGGGSGGGGSGGGGSGGGGSGGGSLQITCPPPMSVEHADI
WVKSYSLYSRERYICNSGFKRKAGTSSLTECVLNKATNVAHWTTPSLKCIRDPALVHQRPAPPS
TVTTAGVTPQPESLSPSGKEPAASSPSSNNTAATTAAIVPGSQLMPSKSPSTGTTEISSHESSH
GTPSQTTAKNWELTASASHQPPGVYPQGHSDTTVAISTSTVLLCGLSAVSLLACYLKSRQTPPL
ASVEMEAMEALPVTWGTSSRDEDLENCSHHL
exemplary CD19 CAR amino acid sequence
SEQ ID NO: 193
MLLLVTSLLLCELPHPAFLLIPDIQMTQTTSSLSASLGDRVTISCRASQDISKYLNWYQQKPDG
TVKLLIYHTSRLHSGVPSRFSGSGSGTDYSLTISNLEQEDIATYFCQQGNTLPYTFGGGTKLEI
TGSTSGSGKPGSGEGSTKGEVKLQESGPGLVAPSQSLSVTCTVSGVSLPDYGVSWIRQPPRKGL
EWLGVIWGSETTYYNSALKSRLTIIKDNSKSQVFLKMNSLQTDDTAIYYCAKHYYYGGSYAMDY
WGQGTSVTVSSAAAIEVMYPPPYLDNEKSNGTIIHVKGKHLCPSPLFPGPSKPFWVLVVVGGVL
ACYSLLVTVAFIIFWVRSKRSRLLHSDYMNMTPRRPGPTRKHYQPYAPPRDFAAYRSRVKESRS
ADAPAYQQGQNQLYNELNLGRREEYDVLDKRRGRDPEMGGKPRRKNPQEGLYNELQKDKMAEAY
SEIGMKGERRRGKGHDGLYQGLSTATKDTYDALHMQALPPR
exemplary EGFR CAR amino acid sequence
SEQ ID NO: 194
MALPVTALLLPLALLLHAARPMDEVQLVESGGGLVQPGGSLRLSCAASGFSFTNYGVHWVRQAP
GKGLEWVSVIWSGGNTDYNTSVKGRFTISRDNSKNTLYLQMNSLRAEDTAVYYCARALTYYDYE
FAYWGQGTLVTVSSGGGGSGGGGSGGGGSEIVLTQSPATLSLSPGERATLSCRASQSIGTNIHW
YQQKPGQAPRLLIYYASESISGIPARFSGSGSGTDFTLTISSLEPEDFAVYYCQQNNNWPTTFG
QGTKLEIKGSLEAAATTTPAPRPPTPAPTIASQPLSLRPEACRPAAGGAVHTRGLDFACDIYIW
APLAGTCGVLLLSLVITLYCKRGRKKLLYIFKQPFMRPVQTTQEEDGCSCRFPEEEEGGCELRV
KFSRSADAPAYQQGQNQLYNELNLGRREEYDVLDKRRGRDPEMGGKPRRKNPQEGLYNELQKDK
[sequence omitted]
exemplary GFP amino acid sequence
SEQ ID NO: 195
MVSKGEELFTGVVPILVELDGDVNGHKESVSGEGEGDATYGKLTLKFICTTGKLPVPWPTLVTT
LTYGVQCFSRYPDHMKQHDFFKSAMPEGYVQERTIFFKDDGNYKTRAEVKFEGDTLVNRIELKG
IDFKEDGNILGHKLEYNYNSHNVYIMADKQKNGIKVNFKIRHNIEDGSVQLADHYQQNTPIGDG
PVLLPDNHYLSTQSALSKDPNEKRDHMVLLEFVTAAGITLGMDELYK
exemplary CXCR1 amino acid sequence
SEQ ID NO: 196
MSNITDPQMWDFDDLNFTGMPPADEDYSPCMLETETLNKYVVIIAYALVFLLSLLGNSLVMLVI
LYSRVGRSVTDVYLLNLALADLLFALTLPIWAASKVNGWIFGTFLCKVVSLLKEVNFYSGILLL
ACISVDRYLAIVHATRTLTQKRHLVKFVCLGCWGLSMNLSLPFFLFRQAYHPNNSSPVCYEVLG
NDTAKWRMVLRILPHTFGFIVPLFVMLFCYGFTLRTLFKAHMGQKHRAMRVIFAVVLIFLLCWL
PYNLVLLADTLMRTQVIQESCERRNNIGRALDATEILGFLHSCLNPIIYAFIGQNFRHGELKIL
AMHGLVSKEFLARHRVTSYTSSSVNVSSNL
exemplary CXCR3B amino acid sequence
SEQ ID NO: 197
MELRKYGPGRLAGTVIGGAAQSKSQTKSDSITKEFLPGLYTAPSSPFPPSQVSDHQVLNDAEVA
ALLENFSSSYDYGENESDSCCTSPPCPQDESLNFDRAFLPALYSLLELLGLLGNGAVAAVLLSR
RTALSSTDTELLHLAVADTLLVLTLPLWAVDAAVQWVFGSGLCKVAGALFNINFYAGALLLACI
SFDRYLNIVHATQLYRRGPPARVILTCLAVWGLCLLFALPDFIFLSAHHDERLNATHCQYNFPQ
VGRTALRVLQLVAGFLLPLLVMAYCYAHILAVLLVSRGQRRLRAMRLVVVVVVAFALCWTPYHL
VVLVDILMDLGALARNCGRESRVDVAKSVTSGLGYMHCCLNPLLYAFVGVKFRERMWMLLLRLG
CPNQRGLQRQPSSSRRDSSWSETSEASYSGL
exemplary CXCR3A amino acid sequence
SEQ ID NO: 198
MVLEVSDHQVLNDAEVAALLENFSSSYDYGENESDSCCTSPPCPQDESLNFDRAFLPALYSLLF
LLGLLGNGAVAAVLLSRRTALSSTDTFLLHLAVADTLLVLTLPLWAVDAAVQWVFGSGLCKVAG
ALFNINFYAGALLLACISFDRYLNIVHATQLYRRGPPARVTLTCLAVWGLCLLFALPDFIFLSA
HHDERLNATHCQYNFPQVGRTALRVLQLVAGFLLPLLVMAYCYAHILAVLLVSRGQRRLRAMRL
VVVVVVAFALCWTPYHLVVLVDILMDLGALARNCGRESRVDVAKSVTSGLGYMHCCLNPLLYAF
VGVKFRERMWMLLLRLGCPNQRGLQRQPSSSRRDSSWSETSEASYSGL
exemplary CCR5 amino acid sequence
SEQ ID NO: 199
MDYQVSSPIYDINYYTSEPCQKINVKQIAARLLPPLYSLVFIFGFVGNMLVILILINCKRLKSM
TDIYLLNLAISDLFFLLTVPFWAHYAAAQWDFGNTMCQLLTGLYFIGFFSGIFFIILLTIDRYL
AVVHAVFALKARTVTFGVVTSVITWVVAVFASLPGIIFTRSQKEGLHYTCSSHFPYSQYQFWKN
FQTLKIVILGLVLPLLVMVICYSGILKTLLRCRNEKKRHRAVRLIFTIMIVYFLFWAPYNIVLL
LNTFQEFFGLNNCSSSNRLDQAMQVTETLGMTHCCINPIIYAFVGEKFRNYLLVFFQKHIAKRE
CKCCSIFQQEAPERASSVYTRSTGEQEISVGL
exemplary CCR2 cargo sequence
SEQ ID NO: 200
MLSTSRSRFIRNTNESGEEVTTFFDYDYGAPCHKEDVKQIGAQLLPPLYSLVFIFGFVGNMLVV
LILINCKKLKCLTDIYLLNLAISDLLFLITLPLWAHSAANEWVEGNAMCKLFTGLYHIGYFGGI
FFIILLTIDRYLAIVHAVFALKARTVTFGVVTSVITWLVAVFASVPGIIFTKCQKEDSVYVCGP
YFPRGWNNFHTIMRNILGLVLPLLIMVICYSGILKTLLRCRNEKKRHRAVRVIFTIMIVYFLEW
TPYNIVILLNTFQEFFGLSNCESTSQLDQATQVTETLGMTHCCINPIIYAFVGEKERSLFHIAL
GCRIAPLQKPVCGGPGVRPGKNVKVTTQGLLDGRGKGKSIGRAPEASLQDKEGA

### AAV Capsids

[0460] In some embodiments, the present disclosure provides one or more polynucleotide constructs (e.g., knock-in cassettes) packaged into an AAV capsid. In some embodiments, an AAV capsid is from or derived from an AAV capsid of an AAV2, 3, 4, 5, 6, 7, 8, 9, or 10 serotype, or one or more hybrids thereof. In some embodiments, an AAV capsid is from an AAV ancestral serotype. In some embodiments, an AAV capsid is an ancestral (Anc) AAV capsid. An Anc capsid is created from a construct sequence that is constructed using evolutionary probabilities and evolutionary modeling to determine a probable ancestral sequence. In some embodiments, an AAV capsid has been modified in a manner known in the art (see e.g., Büning and Srivastava, Capsid modifications for targeting and improving the efficacy of AAV vectors, Mol Ther Methods Clin Dev. 2019)

[0461] In some embodiments, as provided herein, any combination of AAV capsids and AAV constructs (e.g., comprising AAV ITRs) may be used in recombinant AAV (rAAV) particles of the present disclosure. In some embodiments, an AAV ITR is from or derived from an AAV ITR of AAV2, 3, 4, 5, 6, 7, 8, 9, or 10. For example, wild-type or variant AA6 ITRs and AAV6 capsid, wild-type or variant AAV2 ITRs and AAV6 capsid, etc. In some embodiments of the present disclosure, an AAV particle is wholly comprised of AAV6 components (e.g., capsid and ITRs are AAV6 serotype). In some embodiments, an AAV particle is an AAV6/2, AAV6/8 or AAV6/9 particle (e.g., an AAV2, AAV8 or AAV9 capsid with an AAV construct having AAV6 ITRs).

### Exemplary AAV Constructs

[0462] In some embodiments, a donor template is included within an AAV construct. In some embodiments, an AAV construct sequence comprises or consists of the sequence of any one of SEQ ID NO: 201-204. In some embodiments, an exemplary AAV construct is represented by SEQ ID NO:201. In some embodiments, an exemplary AAV construct is represented by SEQ ID NO: 202. In some embodiments, an exemplary AAV construct is represented by SEQ ID NO: 203. In some embodiments, an exemplary AAV construct is represented by SEQ ID NO: 204. In some embodiments, an exemplary AAV construct is at least 80%, 85%, 90%, 95%, 98%, or 99% identical to a sequence represented by SEQ ID NO: 201-204.

exemplary AAV construct for donor template insertion at GAPDH locus
SEQ ID NO: 201
CCTGCAGGCAGCTGCGCGCTCGCTCGCTCACTGAGGCCGCCCGGGCAAAGCCCGGGCGTCGGGC
GACCTTTGGTCGCCCGGCCTCAGTGAGCGAGCGAGCGCGCAGAGAGGGAGTGGCCAACTCCATC
ACTAGGGGTTCCTGTCGACGAAGACTGTGGATGGCCCCTCCGGGAAACTGTGGCGTGATGGCCG
CGGGGCTCTCCAGAACATCATCCCTGCCTCTACTGGCGCTGCCAAGGCTGTGGGCAAGGTCATC
CCTGAGCTGAACGGGAAGCTCACTGGCATGGCCTTCCGTGTCCCCACTGCCAACGTGTCAGTGG
TGGACCTGACCTGCCGTCTAGAAAAACCTGCCAAATATGATGACATCAAGAAGGTGGTGAAGCA
GGCGTCGGAGGGCCCCCTCAAGGGCATCCTGGGCTACACTGAGCACCAGGTGGTCTCCTCTGAC
TTCAACAGCGACACCCACTCCTCCACCTTTGACGCTGGGGCTGGCATTGCCCTCAACGACCACT
TTGTCAAGCTCATTTCCTGGTATGTGGCTGGGGCCAGAGACTGGCTCTTAAAAAGTGCAGGGTC
TGGCGCCCTCTGGTGGCTGGCTCAGAAAAAGGGCCCTGACAACTCTTTACATCTTCTAGGTATG
ACAACGAGTTCGGATATAGCAATAGAGTGGTCGATCTGATGGCTCATATGGCTAGCAAAGAGGG
AAGCGGAGCTACTAACTTCAGCCTGCTGAAGCAGGCTGGAGACGTGGAGGAGAACCCTGGACCT
ATGTGGCAACTGCTGCTGCCTACAGCTCTGCTGCTTCTGGTGTCTGCCGGCATGAGAACCGAGG
ATCTGCCTAAGGCCGTGGTGTTCCTGGAACCTCAGTGGTACAGAGTGCTGGAAAAGGACAGCGT
GACCCTGAAGTGCCAGGGCGCCTATTCTCCCGAGGACAATAGCACCCAGTGGTTCCACAACGAG
AGCCTGATCAGCAGCCAGGCCAGCAGCTACTTTATCGATGCCGCCACCGTGGACGACAGCGGCG
AGTACAGATGCCAGACCAATCTGAGCACCCTGAGCGACCCTGTGCAGCTGGAAGTGCACATTGG
ATGGTTGCTGCTGCAAGCCCCTAGATGGGTGTTCAAAGAAGAGGACCCCATCCACCTGAGATGC
CACTCTTGGAAGAACACAGCCCTGCACAAAGTGACCTACCTGCAGAACGGCAAGGGCAGAAAGT
ACTTCCACCACAACAGCGACTTCTACATCCCCAAGGCCACACTGAAGGACTCCGGCTCCTACTT
CTGCAGAGGCCTGGTCGGCAGCAAGAACGTGTCCAGCGAGACAGTGAACATCACCATCACACAG
GGCCTCGCCGTGTCTACCATCAGCAGCTTTTTCCCACCTGGCTATCAGGTGTCCTTCTGCCTGG
TCATGGTGCTGCTGTTCGCCGTGGATACCGGCCTGTACTTCAGCGTCAAGACCAACATCCGGTC
CAGCACCAGAGACTGGAAGGACCACAAGTTCAAGTGGCGGAAGGACCCTCAGGACAAGTAAGCG
GCCGCGTCGAGTCTAGAGGGCCCGTTTAAACCCGCTGATCAGCCTCGACTGTGCCTTCTAGTTG
CCAGCCATCTGTTGTTTGCCCCTCCCCCGTGCCTTCCTTGACCCTGGAAGGTGCCACTCCCACT
GTCCTTTCCTAATAAAATGAGGAAATTGCATCGCATTGTCTGAGTAGGTGTCATTCTATTCTGG
GGGGTGGGGTGGGGCAGGACAGCAAGGGGGAGGATTGGGAAGACAATAGCAGGCATGCTGGGGA
TGCGGTGGGCTCTATGGATTTGGCTACAGCAACAGGGTGGTGGACCTCATGGCCCACATGGCCT
CCAAGGAGTAAGACCCCTGGACCACCAGCCCCAGCAAGAGCACAAGAGGAAGAGAGAGACCCTC
ACTGCTGGGGAGTCCCTGCCACACTCAGTCCCCCACCACACTGAATCTCCCCTCCTCACAGTTG
CCATGTAGACCCCTTGAAGAGGGGAGGGGCCTAGGGAGCCGCACCTTGTCATGTACCATCAATA
AAGTACCCTGTGCTCAACCAGTTACTTGTCCTGTCTTATTCTAGGGTCTGGGGCAGAGGGGAGG
GAAGCTGGGCTTGTGTCAAGGTGAGACATTCTTGCTGGGGAGGGACCTGGTATGTTCTCCTCAG
ACTGAGGGTAGGGCCTCCAAACAGCCTTGCTTGCTTCGAGAACCATTTGCTTCCCGCTCAGACG
TCTTGAGTGCTACAGGAAGCTGGCACCACTACTTCAGAGAACAAGGCCTTTTCCTCTCCTCGCT
CCAGTAGATCTAGGAACCCCTAGTGATGGAGTTGGCCACTCCCTCTCTGCGCGCTCGCTCGCTC
ACTGAGGCCGGGCGACCAAAGGTCGCCCGACGCCCGGGCTTTGCCCGGGCGGCCTCAGTGAGCG
AGCGAGCGCGCAGCTGCCTGCAGG
exemplary AAV construct for donor template insertion at GAPDH locus
SEQ ID NO: 202
CCTGCAGGCAGCTGCGCGCTCGCTCGCTCACTGAGGCCGCCCGGGCAAAGCCCGGGCGTCGGGC
GACCTTTGGTCGCCCGGCCTCAGTGAGCGAGCGAGCGCGCAGAGAGGGAGTGGCCAACTCCATC
ACTAGGGGTTCCTGTCGACGAAGACTGTGGATGGCCCCTCCGGGAAACTGTGGCGTGATGGCCG
CGGGGCTCTCCAGAACATCATCCCTGCCTCTACTGGCGCTGCCAAGGCTGTGGGCAAGGTCATC
CCTGAGCTGAACGGGAAGCTCACTGGCATGGCCTTCCGTGTCCCCACTGCCAACGTGTCAGTGG
TGGACCTGACCTGCCGTCTAGAAAAACCTGCCAAATATGATGACATCAAGAAGGTGGTGAAGCA
GGCGTCGGAGGGCCCCCTCAAGGGCATCCTGGGCTACACTGAGCACCAGGTGGTCTCCTCTGAC
TTCAACAGCGACACCCACTCCTCCACCTTTGACGCTGGGGCTGGCATTGCCCTCAACGACCACT
TTGTCAAGCTCATTTCCTGGTATGTGGCTGGGGCCAGAGACTGGCTCTTAAAAAGTGCAGGGTC
TGGCGCCCTCTGGTGGCTGGCTCAGAAAAAGGGCCCTGACAACTCTTTACATCTTCTAGGTATG
ACAACGAGTTCGGATATAGCAATAGAGTGGTCGATCTGATGGCTCATATGGCTAGCAAAGAGGG
AAGCGGAGCTACTAACTTCAGCCTGCTGAAGCAGGCTGGAGACGTGGAGGAGAACCCTGGACCT
ATGGTGAGCAAGGGCGAGGAGCTGTTCACCGGGGTGGTGCCCATCCTGGTCGAGCTGGACGGCG
ACGTAAACGGCCACAAGTTCAGCGTGTCCGGCGAGGGCGAGGGCGATGCCACCTACGGCAAGCT
GACCCTGAAGTTCATCTGCACCACCGGCAAGCTGCCCGTGCCCTGGCCCACCCTCGTGACCACC
CTGACCTACGGCGTGCAGTGCTTCAGCCGCTACCCCGACCACATGAAGCAGCACGACTTCTTCA
AGTCCGCCATGCCCGAAGGCTACGTCCAGGAGCGCACCATCTTCTTCAAGGACGACGGCAACTA
CAAGACCCGCGCCGAGGTGAAGTTCGAGGGCGACACCCTGGTGAACCGCATCGAGCTGAAGGGC
ATCGACTTCAAGGAGGACGGCAACATCCTGGGGCACAAGCTGGAGTACAACTACAACAGCCACA
ACGTCTATATCATGGCCGACAAGCAGAAGAACGGCATCAAGGTGAACTTCAAGATCCGCCACAA
CATCGAGGACGGCAGCGTGCAGCTCGCCGACCACTACCAGCAGAACACCCCCATCGGCGACGGC
CCCGTGCTGCTGCCCGACAACCACTACCTGAGCACCCAGTCCGCCCTGAGCAAAGACCCCAACG
AGAAGCGCGATCACATGGTCCTGCTGGAGTTCGTGACCGCCGCCGGGATCACTCTCGGCATGGA
CGAGCTGTACAAGTGAGCGGCCGCGTCGAGTCTAGAGGGCCCGTTTAAACCCGCTGATCAGCCT
CGACTGTGCCTTCTAGTTGCCAGCCATCTGTTGTTTGCCCCTCCCCCGTGCCTTCCTTGACCCT
GGAAGGTGCCACTCCCACTGTCCTTTCCTAATAAAATGAGGAAATTGCATCGCATTGTCTGAGT
AGGTGTCATTCTATTCTGGGGGGTGGGGTGGGGCAGGACAGCAAGGGGGAGGATTGGGAAGACA
ATAGCAGGCATGCTGGGGATGCGGTGGGCTCTATGGATTTGGCTACAGCAACAGGGTGGTGGAC
CTCATGGCCCACATGGCCTCCAAGGAGTAAGACCCCTGGACCACCAGCCCCAGCAAGAGCACAA
GAGGAAGAGAGAGACCCTCACTGCTGGGGAGTCCCTGCCACACTCAGTCCCCCACCACACTGAA
TCTCCCCTCCTCACAGTTGCCATGTAGACCCCTTGAAGAGGGGAGGGGCCTAGGGAGCCGCACC
TTGTCATGTACCATCAATAAAGTACCCTGTGCTCAACCAGTTACTTGTCCTGTCTTATTCTAGG
GTCTGGGGCAGAGGGGAGGGAAGCTGGGCTTGTGTCAAGGTGAGACATTCTTGCTGGGGAGGGA
CCTGGTATGTTCTCCTCAGACTGAGGGTAGGGCCTCCAAACAGCCTTGCTTGCTTCGAGAACCA
TTTGCTTCCCGCTCAGACGTCTTGAGTGCTACAGGAAGCTGGCACCACTACTTCAGAGAACAAG
GCCTTTTCCTCTCCTCGCTCCAGTAGATCTAGGAACCCCTAGTGATGGAGTTGGCCACTCCCTC
TCTGCGCGCTCGCTCGCTCACTGAGGCCGGGCGACCAAAGGTCGCCCGACGCCCGGGCTTTGCC
CGGGCGGCCTCAGTGAGCGAGCGAGCGCGCAGCTGCCTGCAGG
exemplary AAV construct for donor template insertion at GAPDH locus
SEQ ID NO: 203
CCTGCAGGCAGCTGCGCGCTCGCTCGCTCACTGAGGCCGCCCGGGCAAAGCCCGGGCGTCGGGC
GACCTTTGGTCGCCCGGCCTCAGTGAGCGAGCGAGCGCGCAGAGAGGGAGTGGCCAACTCCATC
ACTAGGGGTTCCTGTCGACGAAGACTGTGGATGGCCCCTCCGGGAAACTGTGGCGTGATGGCCG
CGGGGCTCTCCAGAACATCATCCCTGCCTCTACTGGCGCTGCCAAGGCTGTGGGCAAGGTCATC
CCTGAGCTGAACGGGAAGCTCACTGGCATGGCCTTCCGTGTCCCCACTGCCAACGTGTCAGTGG
TGGACCTGACCTGCCGTCTAGAAAAACCTGCCAAATATGATGACATCAAGAAGGTGGTGAAGCA
GGCGTCGGAGGGCCCCCTCAAGGGCATCCTGGGCTACACTGAGCACCAGGTGGTCTCCTCTGAC
TTCAACAGCGACACCCACTCCTCCACCTTTGACGCTGGGGCTGGCATTGCCCTCAACGACCACT
TTGTCAAGCTCATTTCCTGGTATGTGGCTGGGGCCAGAGACTGGCTCTTAAAAAGTGCAGGGTC
TGGCGCCCTCTGGTGGCTGGCTCAGAAAAAGGGCCCTGACAACTCTTTACATCTTCTAGGTATG
ACAACGAGTTCGGATATAGCAATAGAGTGGTCGATCTGATGGCTCATATGGCTAGCAAAGAGGG
AAGCGGAGCTACTAACTTCAGCCTGCTGAAGCAGGCTGGAGACGTGGAGGAGAACCCTGGACCT
ATGCTTCTCCTGGTGACAAGCCTTCTGCTCTGTGAGTTACCACACCCAGCATTCCTCCTGATCC
CAGACATCCAGATGACACAGACTACATCCTCCCTGTCTGCCTCTCTGGGAGACAGAGTCACCAT
CAGTTGCAGGGCAAGTCAGGACATTAGTAAATATTTAAATTGGTATCAGCAGAAACCAGATGGA
ACTGTTAAACTCCTGATCTACCATACATCAAGATTACACTCAGGAGTCCCATCAAGGTTCAGTG
GCAGTGGGTCTGGAACAGATTATTCTCTCACCATTAGCAACCTGGAGCAAGAAGATATTGCCAC
TTACTTTTGCCAACAGGGTAATACGCTTCCGTACACGTTCGGAGGGGGGACTAAGTTGGAAATA
ACAGGCTCCACCTCTGGATCCGGCAAGCCCGGATCTGGCGAGGGATCCACCAAGGGCGAGGTGA
AACTGCAGGAGTCAGGACCTGGCCTGGTGGCGCCCTCACAGAGCCTGTCCGTCACATGCACTGT
CTCAGGGGTCTCATTACCCGACTATGGTGTAAGCTGGATTCGCCAGCCTCCACGAAAGGGTCTG
GAGTGGCTGGGAGTAATATGGGGTAGTGAAACCACATACTATAATTCAGCTCTCAAATCCAGAC
TGACCATCATCAAGGACAACTCCAAGAGCCAAGTTTTCTTAAAAATGAACAGTCTGCAAACTGA
TGACACAGCCATTTACTACTGTGCCAAACATTATTACTACGGTGGTAGCTATGCTATGGACTAC
TGGGGTCAAGGAACCTCAGTCACCGTCTCCTCAGCGGCCGCAATTGAAGTTATGTATCCTCCTC
CTTACCTAGACAATGAGAAGAGCAATGGAACCATTATCCATGTGAAAGGGAAACACCTTTGTCC
AAGTCCCCTATTTCCCGGACCTTCTAAGCCCTTTTGGGTGCTGGTGGTGGTTGGGGGAGTCCTG
GCTTGCTATAGCTTGCTAGTAACAGTGGCCTTTATTATTTTCTGGGTGAGGAGTAAGAGGAGCA
GGCTCCTGCACAGTGACTACATGAACATGACTCCCCGCCGCCCCGGGCCCACCCGCAAGCATTA
CCAGCCCTATGCCCCACCACGCGACTTCGCAGCCTATCGCTCCAGAGTGAAGTTCAGCAGGAGC
GCAGACGCCCCCGCGTACCAGCAGGGCCAGAACCAGCTCTATAACGAGCTCAATCTAGGACGAA
GAGAGGAGTACGATGTTTTGGACAAGAGACGTGGCCGGGACCCTGAGATGGGGGGAAAGCCGAG
AAGGAAGAACCCTCAGGAAGGCCTGTACAATGAACTGCAGAAAGATAAGATGGCGGAGGCCTAC
AGTGAGATTGGGATGAAAGGCGAGCGCCGGAGGGGCAAGGGGCACGATGGCCTTTACCAGGGTC
TCAGTACAGCCACCAAGGACACCTACGACGCCCTTCACATGCAGGCCCTGCCCCCTCGCTAAAG
CGGCCGCGTCGAGTCTAGAGGGCCCGTTTAAACCCGCTGATCAGCCTCGACTGTGCCTTCTAGT
TGCCAGCCATCTGTTGTTTGCCCCTCCCCCGTGCCTTCCTTGACCCTGGAAGGTGCCACTCCCA
CTGTCCTTTCCTAATAAAATGAGGAAATTGCATCGCATTGTCTGAGTAGGTGTCATTCTATTCT
GGGGGGTGGGGTGGGGCAGGACAGCAAGGGGGAGGATTGGGAAGACAATAGCAGGCATGCTGGG
GATGCGGTGGGCTCTATGGATTTGGCTACAGCAACAGGGTGGTGGACCTCATGGCCCACATGGC
CTCCAAGGAGTAAGACCCCTGGACCACCAGCCCCAGCAAGAGCACAAGAGGAAGAGAGAGACCC
TCACTGCTGGGGAGTCCCTGCCACACTCAGTCCCCCACCACACTGAATCTCCCCTCCTCACAGT
TGCCATGTAGACCCCTTGAAGAGGGGAGGGGCCTAGGGAGCCGCACCTTGTCATGTACCATCAA
TAAAGTACCCTGTGCTCAACCAGTTACTTGTCCTGTCTTATTCTAGGGTCTGGGGCAGAGGGGA
GGGAAGCTGGGCTTGTGTCAAGGTGAGACATTCTTGCTGGGGAGGGACCTGGTATGTTCTCCTC
AGACTGAGGGTAGGGCCTCCAAACAGCCTTGCTTGCTTCGAGAACCATTTGCTTCCCGCTCAGA
CGTCTTGAGTGCTACAGGAAGCTGGCACCACTACTTCAGAGAACAAGGCCTTTTCCTCTCCTCG
CTCCAGTAGATCTAGGAACCCCTAGTGATGGAGTTGGCCACTCCCTCTCTGCGCGCTCGCTCGC
TCACTGAGGCCGGGCGACCAAAGGTCGCCCGACGCCCGGGCTTTGCCCGGGCGGCCTCAGTGAG
CGAGCGAGCGCGCAGCTGCCTGCAGG
exemplary AAV construct for donor template insertion at GAPDH locus
SEQ ID NO: 204
CCTGCAGGCAGCTGCGCGCTCGCTCGCTCACTGAGGCCGCCCGGGCAAAGCCCGGGCGTCGGGC
GACCTTTGGTCGCCCGGCCTCAGTGAGCGAGCGAGCGCGCAGAGAGGGAGTGGCCAACTCCATC
ACTAGGGGTTCCTGTCGACGAAGACTGTGGATGGCCCCTCCGGGAAACTGTGGCGTGATGGCCG
CGGGGCTCTCCAGAACATCATCCCTGCCTCTACTGGCGCTGCCAAGGCTGTGGGCAAGGTCATC
CCTGAGCTGAACGGGAAGCTCACTGGCATGGCCTTCCGTGTCCCCACTGCCAACGTGTCAGTGG
TGGACCTGACCTGCCGTCTAGAAAAACCTGCCAAATATGATGACATCAAGAAGGTGGTGAAGCA
GGCGTCGGAGGGCCCCCTCAAGGGCATCCTGGGCTACACTGAGCACCAGGTGGTCTCCTCTGAC
TTCAACAGCGACACCCACTCCTCCACCTTTGACGCTGGGGCTGGCATTGCCCTCAACGACCACT
TTGTCAAGCTCATTTCCTGGTATGTGGCTGGGGCCAGAGACTGGCTCTTAAAAAGTGCAGGGTC
TGGCGCCCTCTGGTGGCTGGCTCAGAAAAAGGGCCCTGACAACTCTTTACATCTTCTAGGTATG
ACAACGAGTTCGGATATAGCAATAGAGTGGTCGATCTGATGGCTCATATGGCTAGCAAAGAGGG
AAGCGGAGCTACTAACTTCAGCCTGCTGAAGCAGGCTGGAGACGTGGAGGAGAACCCTGGACCT
ATGGCACTCCCCGTCACCGCCCTTCTCTTGCCCCTCGCCCTGCTGCTGCATGCTGCCAGGCCCA
TGGACGAAGTGCAGCTCGTGGAGTCCGGTGGAGGACTCGTCCAACCGGGCGGATCCCTTCGCTT
GTCCTGCGCCGCATCAGGCTTCAGCTTCACCAACTATGGCGTCCACTGGGTCAGACAGGCCCCC
GGAAAGGGACTGGAATGGGTGTCCGTGATCTGGAGCGGCGGGAACACCGACTACAACACCTCCG
TGAAGGGCCGGTTCACTATTAGCCGCGACAACTCCAAGAACACTCTGTACCTCCAAATGAACTC
CCTGAGGGCCGAAGATACTGCTGTGTACTATTGCGCGAGAGCCCTGACCTACTACGACTACGAG
TTCGCGTACTGGGGCCAGGGGACTCTCGTGACCGTGTCCAGCGGTGGTGGAGGTTCCGGAGGCG
GAGGTTCTGGTGGCGGGGGATCAGAAATCGTGCTGACTCAGTCCCCTGCGACCTTGTCCCTGAG
CCCTGGAGAACGGGCCACCCTGAGCTGTAGAGCCAGCCAGAGCATCGGGACAAATATTCACTGG
TACCAGCAGAAACCCGGACAAGCACCACGGCTGCTGATCTACTACGCCTCCGAGTCGATTTCCG
GAATCCCGGCTCGCTTTTCGGGGTCTGGATCGGGAACGGACTTCACTCTGACCATCTCGTCGCT
GGAACCCGAGGATTTCGCCGTGTACTACTGCCAACAGAACAACAATTGGCCGACCACGTTCGGC
CAGGGCACCAAGCTCGAGATTAAGGGATCACTGGAAGCGGCCGCAACCACAACACCTGCTCCAA
GGCCCCCCACACCCGCTCCAACTATAGCCAGCCAACCATTGAGCCTCAGACCTGAAGCTTGCAG
GCCCGCAGCAGGAGGCGCCGTCCATACGCGAGGCCTGGACTTCGCGTGTGATATTTATATTTGG
GCCCCTTTGGCCGGAACATGTGGGGTGTTGCTTCTCTCCCTTGTGATCACTCTGTATTGTAAGC
GCGGGAGAAAGAAGCTCCTGTACATCTTCAAGCAGCCTTTTATGCGACCTGTGCAAACCACTCA
GGAAGAAGATGGGTGTTCATGCCGCTTCCCCGAGGAGGAAGAAGGAGGGTGTGAACTGAGGGTG
AAATTTTCTAGAAGCGCCGATGCTCCCGCATATCAGCAGGGTCAGAATCAGCTCTACAATGAAT
TGAATCTCGGCAGGCGAGAAGAGTACGATGTTCTGGACAAGAGACGGGGCAGGGATCCCGAGAT
GGGGGGAAAGCCCCGGAGAAAAAATCCTCAGGAGGGGTTGTACAATGAGCTGCAGAAGGACAAG
ATGGCTGAAGCCTATAGCGAGATCGGAATGAAAGGCGAAAGACGCAGAGGCAAGGGGCATGACG
GTCTGTACCAGGGTCTCTCTACAGCCACCAAGGACACTTATGATGCGTTGCATATGCAAGCCTT
GCCACCCCGCTAAAGCGGCCGCGTCGAGTCTAGAGGGCCCGTTTAAACCCGCTGATCAGCCTCG
ACTGTGCCTTCTAGTTGCCAGCCATCTGTTGTTTGCCCCTCCCCCGTGCCTTCCTTGACCCTGG
AAGGTGCCACTCCCACTGTCCTTTCCTAATAAAATGAGGAAATTGCATCGCATTGTCTGAGTAG
GTGTCATTCTATTCTGGGGGGTGGGGTGGGGCAGGACAGCAAGGGGGAGGATTGGGAAGACAAT
AGCAGGCATGCTGGGGATGCGGTGGGCTCTATGGATTTGGCTACAGCAACAGGGTGGTGGACCT
CATGGCCCACATGGCCTCCAAGGAGTAAGACCCCTGGACCACCAGCCCCAGCAAGAGCACAAGA
GGAAGAGAGAGACCCTCACTGCTGGGGAGTCCCTGCCACACTCAGTCCCCCACCACACTGAATC
TCCCCTCCTCACAGTTGCCATGTAGACCCCTTGAAGAGGGGAGGGGCCTAGGGAGCCGCACCTT
GTCATGTACCATCAATAAAGTACCCTGTGCTCAACCAGTTACTTGTCCTGTCTTATTCTAGGGT
CTGGGGCAGAGGGGAGGGAAGCTGGGCTTGTGTCAAGGTGAGACATTCTTGCTGGGGAGGGACC
TGGTATGTTCTCCTCAGACTGAGGGTAGGGCCTCCAAACAGCCTTGCTTGCTTCGAGAACCATT
TGCTTCCCGCTCAGACGTCTTGAGTGCTACAGGAAGCTGGCACCACTACTTCAGAGAACAAGGC
CTTTTCCTCTCCTCGCTCCAGTAGATCTAGGAACCCCTAGTGATGGAGTTGGCCACTCCCTCTC
TGCGCGCTCGCTCGCTCACTGAGGCCGGGCGACCAAAGGTCGCCCGACGCCCGGGCTTTGCCCG
GGCGGCCTCAGTGAGCGAGCGAGCGCGCAGCTGCCTGCAGG

### Exemplary Donor Template Sequences

[0463] In some embodiments, a donor template comprises in 5′ to 3′ order, a target sequence 5′ homology arm (which optionally comprises an optimized sequence that is not a wild type sequence), a second regulatory element that enables expression of a cargo sequence as a separate translational product (e.g., an IRES sequence and/or a 2A element), a cargo sequence (e.g., a gene product of interest), optionally a second regulatory element that enables expression of a cargo sequence as a separate translational product (e.g., an IRES sequence and/or a 2A element), optionally a second cargo sequence (e.g., a gene product of interest), optionally a 3′ UTR, a poly adenylation signal (e.g., a BGHpA signal), and a target sequence 3′ homology arm (which optionally comprises an optimized sequence that is not a wild type sequence).

[0464] In some embodiments, a donor template comprises or consists of the sequence of any one of SEQ ID NOs: 38-57 and 205-218. In some embodiments, a donor template comprises or consists of a sequence that is at least 85%, 90%, 95%, 98% or 99% identical to any one of SEQ ID NOs: 38-57 and 205-218.

exemplary donor template for insertion at GAPDH locus
SEQ ID NO: 38
GAAGACTGTGGATGGCCCCTCCGGGAAACTGTGGCGTGATGGCCGCGGGGCTCTCCAGAACATC
ATCCCTGCCTCTACTGGCGCTGCCAAGGCTGTGGGCAAGGTCATCCCTGAGCTGAACGGGAAGC
TCACTGGCATGGCCTTCCGTGTCCCCACTGCCAACGTGTCAGTGGTGGACCTGACCTGCCGTCT
AGAAAAACCTGCCAAATATGATGACATCAAGAAGGTGGTGAAGCAGGCGTCGGAGGGCCCCCTC
AAGGGCATCCTGGGCTACACTGAGCACCAGGTGGTCTCCTCTGACTTCAACAGCGACACCCACT
CCTCCACCTTTGACGCTGGGGCTGGCATTGCCCTCAACGACCACTTTGTCAAGCTCATTTCCTG
GTATGTGGCTGGGGCCAGAGACTGGCTCTTAAAAAGTGCAGGGTCTGGCGCCCTCTGGTGGCTG
GCTCAGAAAAAGGGCCCTGACAACTCTTTACATCTTCTAGGTATGACAACGAGTTCGGATATAG
CAATAGAGTGGTCGATCTGATGGCTCATATGGCTAGCAAAGAGGAGGGCAGAGGAAGTCTTCTA
ACATGCGGTGACGTGGAGGAGAATCCTGGCCCGATGGTGAGCAAGGGCGAGGAGCTGTTCACCG
GGGTGGTGCCCATCCTGGTCGAGCTGGACGGCGACGTAAACGGCCACAAGTTCAGCGTGTCCGG
CGAGGGCGAGGGCGATGCCACCTACGGCAAGCTGACCCTGAAGTTCATCTGCACCACCGGCAAG
CTGCCCGTGCCCTGGCCCACCCTCGTGACCACCCTGACCTACGGCGTGCAGTGCTTCAGCCGCT
ACCCCGACCACATGAAGCAGCACGACTTCTTCAAGTCCGCCATGCCCGAAGGCTACGTCCAGGA
GCGCACCATCTTCTTCAAGGACGACGGCAACTACAAGACCCGCGCCGAGGTGAAGTTCGAGGGC
GACACCCTGGTGAACCGCATCGAGCTGAAGGGCATCGACTTCAAGGAGGACGGCAACATCCTGG
GGCACAAGCTGGAGTACAACTACAACAGCCACAACGTCTATATCATGGCCGACAAGCAGAAGAA
CGGCATCAAGGTGAACTTCAAGATCCGCCACAACATCGAGGACGGCAGCGTGCAGCTCGCCGAC
CACTACCAGCAGAACACCCCCATCGGCGACGGCCCCGTGCTGCTGCCCGACAACCACTACCTGA
GCACCCAGTCCGCCCTGAGCAAAGACCCCAACGAGAAGCGCGATCACATGGTCCTGCTGGAGTT
CGTGACCGCCGCCGGGATCACTCTCGGCATGGACGAGCTGTACAAGGAGGGCAGAGGAAGTCTT
CTAACATGCGGTGACGTGGAGGAGAATCCTGGCCCGATGGTGAGCAAGGGCGAGGAGGATAACA
TGGCCATCATCAAGGAGTTCATGCGCTTCAAGGTGCACATGGAGGGCTCCGTGAACGGCCACGA
GTTCGAGATCGAGGGCGAGGGCGAGGGCCGCCCCTACGAGGGCACCCAGACCGCCAAGCTGAAG
GTGACCAAGGGTGGCCCCCTGCCCTTCGCCTGGGACATCCTGTCCCCTCAGTTCATGTACGGCT
CCAAGGCCTACGTGAAGCACCCCGCCGACATCCCCGACTACTTGAAGCTGTCCTTCCCCGAGGG
CTTCAAGTGGGAGCGCGTGATGAACTTCGAGGACGGCGGCGTGGTGACCGTGACCCAGGACTCC
TCCCTGCAGGACGGCGAGTTCATCTACAAGGTGAAGCTGCGCGGCACCAACTTCCCCTCCGACG
GCCCCGTAATGCAGAAGAAGACAATGGGCTGGGAGGCCTCCTCCGAGCGGATGTACCCCGAGGA
CGGCGCCCTGAAGGGCGAGATCAAGCAGAGGCTGAAGCTGAAGGACGGCGGCCACTACGACGCT
GAGGTCAAGACCACCTACAAGGCCAAGAAGCCCGTGCAGCTGCCCGGCGCCTACAACGTCAACA
TCAAGTTGGACATCACCTCCCACAACGAGGACTACACCATCGTGGAACAGTACGAACGCGCCGA
GGGCCGCCACTCCACCGGCGGCATGGACGAGCTGTACAAGTAAGCGGCCGCGTCGAGTCTAGAG
GGCCCGTTTAAACCCGCTGATCAGCCTCGACTGTGCCTTCTAGTTGCCAGCCATCTGTTGTTTG
CCCCTCCCCCGTGCCTTCCTTGACCCTGGAAGGTGCCACTCCCACTGTCCTTTCCTAATAAAAT
GAGGAAATTGCATCGCATTGTCTGAGTAGGTGTCATTCTATTCTGGGGGGTGGGGTGGGGCAGG
ACAGCAAGGGGGAGGATTGGGAAGACAATAGCAGGCATGCTGGGGATGCGGTGGGCTCTATGGA
TTTGGCTACAGCAACAGGGTGGTGGACCTCATGGCCCACATGGCCTCCAAGGAGTAAGACCCCT
GGACCACCAGCCCCAGCAAGAGCACAAGAGGAAGAGAGAGACCCTCACTGCTGGGGAGTCCCTG
CCACACTCAGTCCCCCACCACACTGAATCTCCCCTCCTCACAGTTGCCATGTAGACCCCTTGAA
GAGGGGGGGGCCTAGGGAGCCGCACCTTGTCATGTACCATCAATAAAGTACCCTGTGCTCAAC
CAGTTACTTGTCCTGTCTTATTCTAGGGTCTGGGGCAGAGGGGAGGGAAGCTGGGCTTGTGTCA
AGGTGAGACATTCTTGCTGGGGAGGGACCTGGTATGTTCTCCTCAGACTGAGGGTAGGGCCTCC
AAACAGCCTTGCTTGCTTCGAGAACCATTTGCTTCCCGCTCAGACGTCTTGAGTGCTACAGGAA
GCTGGCACCACTACTTCAGAGAACAAGGCCTTTTCCTCTCCTCGCTCCAGT
exemplary donor template for insertion at GAPDH locus
SEQ ID NO: 39
GAAGACTGTGGATGGCCCCTCCGGGAAACTGTGGCGTGATGGCCGCGGGGCTCTCCAGAACATC
ATCCCTGCCTCTACTGGCGCTGCCAAGGCTGTGGGCAAGGTCATCCCTGAGCTGAACGGGAAGC
TCACTGGCATGGCCTTCCGTGTCCCCACTGCCAACGTGTCAGTGGTGGACCTGACCTGCCGTCT
AGAAAAACCTGCCAAATATGATGACATCAAGAAGGTGGTGAAGCAGGCGTCGGAGGGCCCCCTC
AAGGGCATCCTGGGCTACACTGAGCACCAGGTGGTCTCCTCTGACTTCAACAGCGACACCCACT
CCTCCACCTTTGACGCTGGGGCTGGCATTGCCCTCAACGACCACTTTGTCAAGCTCATTTCCTG
GTATGTGGCTGGGGCCAGAGACTGGCTCTTAAAAAGTGCAGGGTCTGGCGCCCTCTGGTGGCTG
GCTCAGAAAAAGGGCCCTGACAACTCTTTACATCTTCTAGGTATGACAACGAGTTCGGATATAG
CAATAGAGTGGTCGATCTGATGGCTCATATGGCTAGCAAAGAGGGAAGCGGAGCTACTAACTTC
AGCCTGCTGAAGCAGGCTGGAGACGTGGAGGAGAACCCTGGACCTATGGTGAGCAAGGGCGAGG
AGCTGTTCACCGGGGTGGTGCCCATCCTGGTCGAGCTGGACGGCGACGTAAACGGCCACAAGTT
CAGCGTGTCCGGCGAGGGCGAGGGCGATGCCACCTACGGCAAGCTGACCCTGAAGTTCATCTGC
ACCACCGGCAAGCTGCCCGTGCCCTGGCCCACCCTCGTGACCACCCTGACCTACGGCGTGCAGT
GCTTCAGCCGCTACCCCGACCACATGAAGCAGCACGACTTCTTCAAGTCCGCCATGCCCGAAGG
CTACGTCCAGGAGCGCACCATCTTCTTCAAGGACGACGGCAACTACAAGACCCGCGCCGAGGTG
AAGTTCGAGGGCGACACCCTGGTGAACCGCATCGAGCTGAAGGGCATCGACTTCAAGGAGGACG
GCAACATCCTGGGGCACAAGCTGGAGTACAACTACAACAGCCACAACGTCTATATCATGGCCGA
CAAGCAGAAGAACGGCATCAAGGTGAACTTCAAGATCCGCCACAACATCGAGGACGGCAGCGTG
CAGCTCGCCGACCACTACCAGCAGAACACCCCCATCGGCGACGGCCCCGTGCTGCTGCCCGACA
ACCACTACCTGAGCACCCAGTCCGCCCTGAGCAAAGACCCCAACGAGAAGCGCGATCACATGGT
CCTGCTGGAGTTCGTGACCGCCGCCGGGATCACTCTCGGCATGGACGAGCTGTACAAGTAACCC
CTCTCCCTCCCCCCCCCCTAACGTTACTGGCCGAAGCCGCTTGGAATAAGGCCGGTGTGCGTTT
GTCTATATGTTATTTTCCACCATATTGCCGTCTTTTGGCAATGTGAGGGCCCGGAAACCTGGCC
CTGTCTTCTTGACGAGCATTCCTAGGGGTCTTTCCCCTCTCGCCAAAGGAATGCAAGGTCTGTT
GAATGTCGTGAAGGAAGCAGTTCCTCTGGAAGCTTCTTGAAGACAAACAACGTCTGTAGCGACC
CTTTGCAGGCAGCGGAACCCCCCACCTGGCGACAGGTGCCTCTGCGGCCAAAAGCCACGTGTAT
AAGATACACCTGCAAAGGCGGCACAACCCCAGTGCCACGTTGTGAGTTGGATAGTTGTGGAAAG
AGTCAAATGGCTCTCCTCAAGCGTATTCAACAAGGGGCTGAAGGATGCCCAGAAGGTACCCCAT
TGTATGGGATCTGATCTGGGGCCTCGGTGCACATGCTTTACATGTGTTTAGTCGAGGTTAAAAA
AACGTCTAGGCCCCCCGAACCACGGGGACGTGGTTTTCCTTTGAAAAACACGATGATAAATGGT
GAGCAAGGGCGAGGAGGATAACATGGCCATCATCAAGGAGTTCATGCGCTTCAAGGTGCACATG
GAGGGCTCCGTGAACGGCCACGAGTTCGAGATCGAGGGCGAGGGCGAGGGCCGCCCCTACGAGG
GCACCCAGACCGCCAAGCTGAAGGTGACCAAGGGTGGCCCCCTGCCCTTCGCCTGGGACATCCT
GTCCCCTCAGTTCATGTACGGCTCCAAGGCCTACGTGAAGCACCCCGCCGACATCCCCGACTAC
TTGAAGCTGTCCTTCCCCGAGGGCTTCAAGTGGGAGCGCGTGATGAACTTCGAGGACGGCGGCG
TGGTGACCGTGACCCAGGACTCCTCCCTGCAGGACGGCGAGTTCATCTACAAGGTGAAGCTGCG
CGGCACCAACTTCCCCTCCGACGGCCCCGTAATGCAGAAGAAGACAATGGGCTGGGAGGCCTCC
TCCGAGCGGATGTACCCCGAGGACGGCGCCCTGAAGGGCGAGATCAAGCAGAGGCTGAAGCTGA
AGGACGGCGGCCACTACGACGCTGAGGTCAAGACCACCTACAAGGCCAAGAAGCCCGTGCAGCT
GCCCGGCGCCTACAACGTCAACATCAAGTTGGACATCACCTCCCACAACGAGGACTACACCATC
GTGGAACAGTACGAACGCGCCGAGGGCCGCCACTCCACCGGCGGCATGGACGAGCTGTACAAGT
AAGCGGCCGCGTCGAGTCTAGAGGGCCCGTTTAAACCCGCTGATCAGCCTCGACTGTGCCTTCT
AGTTGCCAGCCATCTGTTGTTTGCCCCTCCCCCGTGCCTTCCTTGACCCTGGAAGGTGCCACTC
CCACTGTCCTTTCCTAATAAAATGAGGAAATTGCATCGCATTGTCTGAGTAGGTGTCATTCTAT
TCTGGGGGGTGGGGTGGGGCAGGACAGCAAGGGGGAGGATTGGGAAGACAATAGCAGGCATGCT
GGGGATGCGGTGGGCTCTATGGATTTGGCTACAGCAACAGGGTGGTGGACCTCATGGCCCACAT
GGCCTCCAAGGAGTAAGACCCCTGGACCACCAGCCCCAGCAAGAGCACAAGAGGAAGAGAGAGA
CCCTCACTGCTGGGGAGTCCCTGCCACACTCAGTCCCCCACCACACTGAATCTCCCCTCCTCAC
AGTTGCCATGTAGACCCCTTGAAGAGGGGAGGGGCCTAGGGAGCCGCACCTTGTCATGTACCAT
CAATAAAGTACCCTGTGCTCAACCAGTTACTTGTCCTGTCTTATTCTAGGGTCTGGGGCAGAGG
GGAGGGAAGCTGGGCTTGTGTCAAGGTGAGACATTCTTGCTGGGGAGGGACCTGGTATGTTCTC
CTCAGACTGAGGGTAGGGCCTCCAAACAGCCTTGCTTGCTTCGAGAACCATTTGCTTCCCGCTC
AGACGTCTTGAGTGCTACAGGAAGCTGGCACCACTACTTCAGAGAACAAGGCCTTTTCCTCTCC
TCGCTCCAGT
exemplary donor template for insertion at GAPDH locus
SEQ ID NO: 40
GAAGACTGTGGATGGCCCCTCCGGGAAACTGTGGCGTGATGGCCGCGGGGCTCTCCAGAACATC
ATCCCTGCCTCTACTGGCGCTGCCAAGGCTGTGGGCAAGGTCATCCCTGAGCTGAACGGGAAGC
TCACTGGCATGGCCTTCCGTGTCCCCACTGCCAACGTGTCAGTGGTGGACCTGACCTGCCGTCT
AGAAAAACCTGCCAAATATGATGACATCAAGAAGGTGGTGAAGCAGGCGTCGGAGGGCCCCCTC
AAGGGCATCCTGGGCTACACTGAGCACCAGGTGGTCTCCTCTGACTTCAACAGCGACACCCACT
CCTCCACCTTTGACGCTGGGGCTGGCATTGCCCTCAACGACCACTTTGTCAAGCTCATTTCCTG
GTATGTGGCTGGGGCCAGAGACTGGCTCTTAAAAAGTGCAGGGTCTGGCGCCCTCTGGTGGCTG
GCTCAGAAAAAGGGCCCTGACAACTCTTTACATCTTCTAGGTATGACAACGAGTTCGGATATAG
CAATAGAGTGGTCGATCTGATGGCTCATATGGCTAGCAAAGAGGGAAGCGGAGCTACTAACTTC
AGCCTGCTGAAGCAGGCTGGAGACGTGGAGGAGAACCCTGGACCTATGGTGAGCAAGGGCGAGG
AGCTGTTCACCGGGGTGGTGCCCATCCTGGTCGAGCTGGACGGCGACGTAAACGGCCACAAGTT
CAGCGTGTCCGGCGAGGGCGAGGGCGATGCCACCTACGGCAAGCTGACCCTGAAGTTCATCTGC
ACCACCGGCAAGCTGCCCGTGCCCTGGCCCACCCTCGTGACCACCCTGACCTACGGCGTGCAGT
GCTTCAGCCGCTACCCCGACCACATGAAGCAGCACGACTTCTTCAAGTCCGCCATGCCCGAAGG
CTACGTCCAGGAGCGCACCATCTTCTTCAAGGACGACGGCAACTACAAGACCCGCGCCGAGGTG
AAGTTCGAGGGCGACACCCTGGTGAACCGCATCGAGCTGAAGGGCATCGACTTCAAGGAGGACG
GCAACATCCTGGGGCACAAGCTGGAGTACAACTACAACAGCCACAACGTCTATATCATGGCCGA
CAAGCAGAAGAACGGCATCAAGGTGAACTTCAAGATCCGCCACAACATCGAGGACGGCAGCGTG
CAGCTCGCCGACCACTACCAGCAGAACACCCCCATCGGCGACGGCCCCGTGCTGCTGCCCGACA
ACCACTACCTGAGCACCCAGTCCGCCCTGAGCAAAGACCCCAACGAGAAGCGCGATCACATGGT
CCTGCTGGAGTTCGTGACCGCCGCCGGGATCACTCTCGGCATGGACGAGCTGTACAAGGGAAGC
GGAGCTACTAACTTCAGCCTGCTGAAGCAGGCTGGAGACGTGGAGGAGAACCCTGGACCTATGG
TGAGCAAGGGCGAGGAGGATAACATGGCCATCATCAAGGAGTTCATGCGCTTCAAGGTGCACAT
GGAGGGCTCCGTGAACGGCCACGAGTTCGAGATCGAGGGCGAGGGCGAGGGCCGCCCCTACGAG
GGCACCCAGACCGCCAAGCTGAAGGTGACCAAGGGTGGCCCCCTGCCCTTCGCCTGGGACATCC
TGTCCCCTCAGTTCATGTACGGCTCCAAGGCCTACGTGAAGCACCCCGCCGACATCCCCGACTA
CTTGAAGCTGTCCTTCCCCGAGGGCTTCAAGTGGGAGCGCGTGATGAACTTCGAGGACGGCGGC
GTGGTGACCGTGACCCAGGACTCCTCCCTGCAGGACGGCGAGTTCATCTACAAGGTGAAGCTGC
GCGGCACCAACTTCCCCTCCGACGGCCCCGTAATGCAGAAGAAGACAATGGGCTGGGAGGCCTC
CTCCGAGCGGATGTACCCCGAGGACGGCGCCCTGAAGGGCGAGATCAAGCAGAGGCTGAAGCTG
AAGGACGGCGGCCACTACGACGCTGAGGTCAAGACCACCTACAAGGCCAAGAAGCCCGTGCAGC
TGCCCGGCGCCTACAACGTCAACATCAAGTTGGACATCACCTCCCACAACGAGGACTACACCAT
CGTGGAACAGTACGAACGCGCCGAGGGCCGCCACTCCACCGGCGGCATGGACGAGCTGTACAAG
TAAGCGGCCGCGTCGAGTCTAGAGGGCCCGTTTAAACCCGCTGATCAGCCTCGACTGTGCCTTC
TAGTTGCCAGCCATCTGTTGTTTGCCCCTCCCCCGTGCCTTCCTTGACCCTGGAAGGTGCCACT
CCCACTGTCCTTTCCTAATAAAATGAGGAAATTGCATCGCATTGTCTGAGTAGGTGTCATTCTA
TTCTGGGGGGTGGGGTGGGGCAGGACAGCAAGGGGGAGGATTGGGAAGACAATAGCAGGCATGC
TGGGGATGCGGTGGGCTCTATGGATTTGGCTACAGCAACAGGGTGGTGGACCTCATGGCCCACA
TGGCCTCCAAGGAGTAAGACCCCTGGACCACCAGCCCCAGCAAGAGCACAAGAGGAAGAGAGAG
ACCCTCACTGCTGGGGAGTCCCTGCCACACTCAGTCCCCCACCACACTGAATCTCCCCTCCTCA
CAGTTGCCATGTAGACCCCTTGAAGAGGGGAGGGGCCTAGGGAGCCGCACCTTGTCATGTACCA
TCAATAAAGTACCCTGTGCTCAACCAGTTACTTGTCCTGTCTTATTCTAGGGTCTGGGGCAGAG
GGGAGGGAAGCTGGGCTTGTGTCAAGGTGAGACATTCTTGCTGGGGAGGGACCTGGTATGTTCT
CCTCAGACTGAGGGTAGGGCCTCCAAACAGCCTTGCTTGCTTCGAGAACCATTTGCTTCCCGCT
CAGACGTCTTGAGTGCTACAGGAAGCTGGCACCACTACTTCAGAGAACAAGGCCTTTTCCTCTC
CTCGCTCCAGT
exemplary donor template for insertion at GAPDH locus
SEQ ID NO: 41
GAAGACTGTGGATGGCCCCTCCGGGAAACTGTGGCGTGATGGCCGCGGGGCTCTCCAGAACATC
ATCCCTGCCTCTACTGGCGCTGCCAAGGCTGTGGGCAAGGTCATCCCTGAGCTGAACGGGAAGC
TCACTGGCATGGCCTTCCGTGTCCCCACTGCCAACGTGTCAGTGGTGGACCTGACCTGCCGTCT
AGAAAAACCTGCCAAATATGATGACATCAAGAAGGTGGTGAAGCAGGCGTCGGAGGGCCCCCTC
AAGGGCATCCTGGGCTACACTGAGCACCAGGTGGTCTCCTCTGACTTCAACAGCGACACCCACT
CCTCCACCTTTGACGCTGGGGCTGGCATTGCCCTCAACGACCACTTTGTCAAGCTCATTTCCTG
GTATGTGGCTGGGGCCAGAGACTGGCTCTTAAAAAGTGCAGGGTCTGGCGCCCTCTGGTGGCTG
GCTCAGAAAAAGGGCCCTGACAACTCTTTACATCTTCTAGGTATGACAACGAGTTCGGATATAG
CAATAGAGTGGTCGATCTGATGGCTCATATGGCTAGCAAAGAGGGAAGCGGAGCTACTAACTTC
AGCCTGCTGAAGCAGGCTGGAGACGTGGAGGAGAACCCTGGACCTATGGTGAGCAAGGGCGAGG
AGCTGTTCACCGGGGTGGTGCCCATCCTGGTCGAGCTGGACGGCGACGTAAACGGCCACAAGTT
CAGCGTGTCCGGCGAGGGCGAGGGCGATGCCACCTACGGCAAGCTGACCCTGAAGTTCATCTGC
ACCACCGGCAAGCTGCCCGTGCCCTGGCCCACCCTCGTGACCACCCTGACCTACGGCGTGCAGT
GCTTCAGCCGCTACCCCGACCACATGAAGCAGCACGACTTCTTCAAGTCCGCCATGCCCGAAGG
CTACGTCCAGGAGCGCACCATCTTCTTCAAGGACGACGGCAACTACAAGACCCGCGCCGAGGTG
AAGTTCGAGGGCGACACCCTGGTGAACCGCATCGAGCTGAAGGGCATCGACTTCAAGGAGGACG
GCAACATCCTGGGGCACAAGCTGGAGTACAACTACAACAGCCACAACGTCTATATCATGGCCGA
CAAGCAGAAGAACGGCATCAAGGTGAACTTCAAGATCCGCCACAACATCGAGGACGGCAGCGTG
CAGCTCGCCGACCACTACCAGCAGAACACCCCCATCGGCGACGGCCCCGTGCTGCTGCCCGACA
ACCACTACCTGAGCACCCAGTCCGCCCTGAGCAAAGACCCCAACGAGAAGCGCGATCACATGGT
CCTGCTGGAGTTCGTGACCGCCGCCGGGATCACTCTCGGCATGGACGAGCTGTACAAGGAGGGC
AGAGGAAGTCTTCTAACATGCGGTGACGTGGAGGAGAATCCTGGCCCGATGGTGAGCAAGGGCG
AGGAGGATAACATGGCCATCATCAAGGAGTTCATGCGCTTCAAGGTGCACATGGAGGGCTCCGT
GAACGGCCACGAGTTCGAGATCGAGGGCGAGGGCGAGGGCCGCCCCTACGAGGGCACCCAGACC
GCCAAGCTGAAGGTGACCAAGGGTGGCCCCCTGCCCTTCGCCTGGGACATCCTGTCCCCTCAGT
TCATGTACGGCTCCAAGGCCTACGTGAAGCACCCCGCCGACATCCCCGACTACTTGAAGCTGTC
CTTCCCCGAGGGCTTCAAGTGGGAGCGCGTGATGAACTTCGAGGACGGCGGCGTGGTGACCGTG
ACCCAGGACTCCTCCCTGCAGGACGGCGAGTTCATCTACAAGGTGAAGCTGCGCGGCACCAACT
TCCCCTCCGACGGCCCCGTAATGCAGAAGAAGACAATGGGCTGGGAGGCCTCCTCCGAGCGGAT
GTACCCCGAGGACGGCGCCCTGAAGGGCGAGATCAAGCAGAGGCTGAAGCTGAAGGACGGCGGC
CACTACGACGCTGAGGTCAAGACCACCTACAAGGCCAAGAAGCCCGTGCAGCTGCCCGGCGCCT
ACAACGTCAACATCAAGTTGGACATCACCTCCCACAACGAGGACTACACCATCGTGGAACAGTA
CGAACGCGCCGAGGGCCGCCACTCCACCGGCGGCATGGACGAGCTGTACAAGTAAGCGGCCGCG
TCGAGTCTAGAGGGCCCGTTTAAACCCGCTGATCAGCCTCGACTGTGCCTTCTAGTTGCCAGCC
ATCTGTTGTTTGCCCCTCCCCCGTGCCTTCCTTGACCCTGGAAGGTGCCACTCCCACTGTCCTT
TCCTAATAAAATGAGGAAATTGCATCGCATTGTCTGAGTAGGTGTCATTCTATTCTGGGGGGTG
GGGTGGGGCAGGACAGCAAGGGGGAGGATTGGGAAGACAATAGCAGGCATGCTGGGGATGCGGT
GGGCTCTATGGATTTGGCTACAGCAACAGGGTGGTGGACCTCATGGCCCACATGGCCTCCAAGG
AGTAAGACCCCTGGACCACCAGCCCCAGCAAGAGCACAAGAGGAAGAGAGAGACCCTCACTGCT
GGGGAGTCCCTGCCACACTCAGTCCCCCACCACACTGAATCTCCCCTCCTCACAGTTGCCATGT
AGACCCCTTGAAGAGGGGAGGGGCCTAGGGAGCCGCACCTTGTCATGTACCATCAATAAAGTAC
CCTGTGCTCAACCAGTTACTTGTCCTGTCTTATTCTAGGGTCTGGGGCAGAGGGGAGGGAAGCT
GGGCTTGTGTCAAGGTGAGACATTCTTGCTGGGGAGGGACCTGGTATGTTCTCCTCAGACTGAG
GGTAGGGCCTCCAAACAGCCTTGCTTGCTTCGAGAACCATTTGCTTCCCGCTCAGACGTCTTGA
GTGCTACAGGAAGCTGGCACCACTACTTCAGAGAACAAGGCCTTTTCCTCTCCTCGCTCCAGT
exemplary donor template for insertion at GAPDH locus
SEQ ID NO: 42
GAAGACTGTGGATGGCCCCTCCGGGAAACTGTGGCGTGATGGCCGCGGGGCTCTCCAGAACATC
ATCCCTGCCTCTACTGGCGCTGCCAAGGCTGTGGGCAAGGTCATCCCTGAGCTGAACGGGAAGC
TCACTGGCATGGCCTTCCGTGTCCCCACTGCCAACGTGTCAGTGGTGGACCTGACCTGCCGTCT
AGAAAAACCTGCCAAATATGATGACATCAAGAAGGTGGTGAAGCAGGCGTCGGAGGGCCCCCTC
AAGGGCATCCTGGGCTACACTGAGCACCAGGTGGTCTCCTCTGACTTCAACAGCGACACCCACT
CCTCCACCTTTGACGCTGGGGCTGGCATTGCCCTCAACGACCACTTTGTCAAGCTCATTTCCTG
GTATGTGGCTGGGGCCAGAGACTGGCTCTTAAAAAGTGCAGGGTCTGGCGCCCTCTGGTGGCTG
GCTCAGAAAAAGGGCCCTGACAACTCTTTACATCTTCTAGGTATGACAACGAGTTCGGATATAG
CAATAGAGTGGTCGATCTGATGGCTCATATGGCTAGCAAAGAGGAGGGCAGAGGAAGTCTTCTA
ACATGCGGTGACGTGGAGGAGAATCCTGGCCCGATGGTGAGCAAGGGCGAGGAGCTGTTCACCG
GGGTGGTGCCCATCCTGGTCGAGCTGGACGGCGACGTAAACGGCCACAAGTTCAGCGTGTCCGG
CGAGGGCGAGGGCGATGCCACCTACGGCAAGCTGACCCTGAAGTTCATCTGCACCACCGGCAAG
CTGCCCGTGCCCTGGCCCACCCTCGTGACCACCCTGACCTACGGCGTGCAGTGCTTCAGCCGCT
ACCCCGACCACATGAAGCAGCACGACTTCTTCAAGTCCGCCATGCCCGAAGGCTACGTCCAGGA
GCGCACCATCTTCTTCAAGGACGACGGCAACTACAAGACCCGCGCCGAGGTGAAGTTCGAGGGC
GACACCCTGGTGAACCGCATCGAGCTGAAGGGCATCGACTTCAAGGAGGACGGCAACATCCTGG
GGCACAAGCTGGAGTACAACTACAACAGCCACAACGTCTATATCATGGCCGACAAGCAGAAGAA
CGGCATCAAGGTGAACTTCAAGATCCGCCACAACATCGAGGACGGCAGCGTGCAGCTCGCCGAC
CACTACCAGCAGAACACCCCCATCGGCGACGGCCCCGTGCTGCTGCCCGACAACCACTACCTGA
GCACCCAGTCCGCCCTGAGCAAAGACCCCAACGAGAAGCGCGATCACATGGTCCTGCTGGAGTT
CGTGACCGCCGCCGGGATCACTCTCGGCATGGACGAGCTGTACAAGGGAAGCGGAGCTACTAAC
TTCAGCCTGCTGAAGCAGGCTGGAGACGTGGAGGAGAACCCTGGACCTATGGTGAGCAAGGGCG
AGGAGGATAACATGGCCATCATCAAGGAGTTCATGCGCTTCAAGGTGCACATGGAGGGCTCCGT
GAACGGCCACGAGTTCGAGATCGAGGGCGAGGGCGAGGGCCGCCCCTACGAGGGCACCCAGACC
GCCAAGCTGAAGGTGACCAAGGGTGGCCCCCTGCCCTTCGCCTGGGACATCCTGTCCCCTCAGT
TCATGTACGGCTCCAAGGCCTACGTGAAGCACCCCGCCGACATCCCCGACTACTTGAAGCTGTC
CTTCCCCGAGGGCTTCAAGTGGGAGCGCGTGATGAACTTCGAGGACGGCGGCGTGGTGACCGTG
ACCCAGGACTCCTCCCTGCAGGACGGCGAGTTCATCTACAAGGTGAAGCTGCGCGGCACCAACT
TCCCCTCCGACGGCCCCGTAATGCAGAAGAAGACAATGGGCTGGGAGGCCTCCTCCGAGCGGAT
GTACCCCGAGGACGGCGCCCTGAAGGGCGAGATCAAGCAGAGGCTGAAGCTGAAGGACGGCGGC
CACTACGACGCTGAGGTCAAGACCACCTACAAGGCCAAGAAGCCCGTGCAGCTGCCCGGCGCCT
ACAACGTCAACATCAAGTTGGACATCACCTCCCACAACGAGGACTACACCATCGTGGAACAGTA
CGAACGCGCCGAGGGCCGCCACTCCACCGGCGGCATGGACGAGCTGTACAAGTAAGCGGCCGCG
TCGAGTCTAGAGGGCCCGTTTAAACCCGCTGATCAGCCTCGACTGTGCCTTCTAGTTGCCAGCC
ATCTGTTGTTTGCCCCTCCCCCGTGCCTTCCTTGACCCTGGAAGGTGCCACTCCCACTGTCCTT
TCCTAATAAAATGAGGAAATTGCATCGCATTGTCTGAGTAGGTGTCATTCTATTCTGGGGGGTG
GGGTGGGGCAGGACAGCAAGGGGGAGGATTGGGAAGACAATAGCAGGCATGCTGGGGATGCGGT
GGGCTCTATGGATTTGGCTACAGCAACAGGGTGGTGGACCTCATGGCCCACATGGCCTCCAAGG
AGTAAGACCCCTGGACCACCAGCCCCAGCAAGAGCACAAGAGGAAGAGAGAGACCCTCACTGCT
GGGGAGTCCCTGCCACACTCAGTCCCCCACCACACTGAATCTCCCCTCCTCACAGTTGCCATGT
AGACCCCTTGAAGAGGGGAGGGGCCTAGGGAGCCGCACCTTGTCATGTACCATCAATAAAGTAC
CCTGTGCTCAACCAGTTACTTGTCCTGTCTTATTCTAGGGTCTGGGGCAGAGGGGAGGGAAGCT
GGGCTTGTGTCAAGGTGAGACATTCTTGCTGGGGAGGGACCTGGTATGTTCTCCTCAGACTGAG
GGTAGGGCCTCCAAACAGCCTTGCTTGCTTCGAGAACCATTTGCTTCCCGCTCAGACGTCTTGA
GTGCTACAGGAAGCTGGCACCACTACTTCAGAGAACAAGGCCTTTTCCTCTCCTCGCTCCAGT
exemplary donor template for insertion at GAPDH locus
SEQ ID NO: 43
GAAGACTGTGGATGGCCCCTCCGGGAAACTGTGGCGTGATGGCCGCGGGGCTCTCCAGAACATC
ATCCCTGCCTCTACTGGCGCTGCCAAGGCTGTGGGCAAGGTCATCCCTGAGCTGAACGGGAAGC
TCACTGGCATGGCCTTCCGTGTCCCCACTGCCAACGTGTCAGTGGTGGACCTGACCTGCCGTCT
AGAAAAACCTGCCAAATATGATGACATCAAGAAGGTGGTGAAGCAGGCGTCGGAGGGCCCCCTC
AAGGGCATCCTGGGCTACACTGAGCACCAGGTGGTCTCCTCTGACTTCAACAGCGACACCCACT
CCTCCACCTTTGACGCTGGGGCTGGCATTGCCCTCAACGACCACTTTGTCAAGCTCATTTCCTG
GTATGTGGCTGGGGCCAGAGACTGGCTCTTAAAAAGTGCAGGGTCTGGCGCCCTCTGGTGGCTG
GCTCAGAAAAAGGGCCCTGACAACTCTTTACATCTTCTAGGTATGACAACGAGTTCGGATATAG
CAATAGAGTGGTCGATCTGATGGCTCATATGGCTAGCAAAGAGGAGGGCAGAGGAAGTCTTCTA
ACATGCGGTGACGTGGAGGAGAATCCTGGCCCGATGGTGAGCAAGGGCGAGGAGCTGTTCACCG
GGGTGGTGCCCATCCTGGTCGAGCTGGACGGCGACGTAAACGGCCACAAGTTCAGCGTGTCCGG
CGAGGGCGAGGGCGATGCCACCTACGGCAAGCTGACCCTGAAGTTCATCTGCACCACCGGCAAG
CTGCCCGTGCCCTGGCCCACCCTCGTGACCACCCTGACCTACGGCGTGCAGTGCTTCAGCCGCT
ACCCCGACCACATGAAGCAGCACGACTTCTTCAAGTCCGCCATGCCCGAAGGCTACGTCCAGGA
GCGCACCATCTTCTTCAAGGACGACGGCAACTACAAGACCCGCGCCGAGGTGAAGTTCGAGGGC
GACACCCTGGTGAACCGCATCGAGCTGAAGGGCATCGACTTCAAGGAGGACGGCAACATCCTGG
GGCACAAGCTGGAGTACAACTACAACAGCCACAACGTCTATATCATGGCCGACAAGCAGAAGAA
CGGCATCAAGGTGAACTTCAAGATCCGCCACAACATCGAGGACGGCAGCGTGCAGCTCGCCGAC
CACTACCAGCAGAACACCCCCATCGGCGACGGCCCCGTGCTGCTGCCCGACAACCACTACCTGA
GCACCCAGTCCGCCCTGAGCAAAGACCCCAACGAGAAGCGCGATCACATGGTCCTGCTGGAGTT
CGTGACCGCCGCCGGGATCACTCTCGGCATGGACGAGCTGTACAAGTAACCCCTCTCCCTCCCC
CCCCCCTAACGTTACTGGCCGAAGCCGCTTGGAATAAGGCCGGTGTGCGTTTGTCTATATGTTA
TTTTCCACCATATTGCCGTCTTTTGGCAATGTGAGGGCCCGGAAACCTGGCCCTGTCTTCTTGA
CGAGCATTCCTAGGGGTCTTTCCCCTCTCGCCAAAGGAATGCAAGGTCTGTTGAATGTCGTGAA
GGAAGCAGTTCCTCTGGAAGCTTCTTGAAGACAAACAACGTCTGTAGCGACCCTTTGCAGGCAG
CGGAACCCCCCACCTGGCGACAGGTGCCTCTGCGGCCAAAAGCCACGTGTATAAGATACACCTG
CAAAGGCGGCACAACCCCAGTGCCACGTTGTGAGTTGGATAGTTGTGGAAAGAGTCAAATGGCT
CTCCTCAAGCGTATTCAACAAGGGGCTGAAGGATGCCCAGAAGGTACCCCATTGTATGGGATCT
GATCTGGGGCCTCGGTGCACATGCTTTACATGTGTTTAGTCGAGGTTAAAAAAACGTCTAGGCC
CCCCGAACCACGGGGACGTGGTTTTCCTTTGAAAAACACGATGATAAATGGTGAGCAAGGGCGA
GGAGGATAACATGGCCATCATCAAGGAGTTCATGCGCTTCAAGGTGCACATGGAGGGCTCCGTG
AACGGCCACGAGTTCGAGATCGAGGGCGAGGGCGAGGGCCGCCCCTACGAGGGCACCCAGACCG
CCAAGCTGAAGGTGACCAAGGGTGGCCCCCTGCCCTTCGCCTGGGACATCCTGTCCCCTCAGTT
CATGTACGGCTCCAAGGCCTACGTGAAGCACCCCGCCGACATCCCCGACTACTTGAAGCTGTCC
TTCCCCGAGGGCTTCAAGTGGGAGCGCGTGATGAACTTCGAGGACGGCGGCGTGGTGACCGTGA
CCCAGGACTCCTCCCTGCAGGACGGCGAGTTCATCTACAAGGTGAAGCTGCGCGGCACCAACTT
CCCCTCCGACGGCCCCGTAATGCAGAAGAAGACAATGGGCTGGGAGGCCTCCTCCGAGCGGATG
TACCCCGAGGACGGCGCCCTGAAGGGCGAGATCAAGCAGAGGCTGAAGCTGAAGGACGGCGGCC
ACTACGACGCTGAGGTCAAGACCACCTACAAGGCCAAGAAGCCCGTGCAGCTGCCCGGCGCCTA
CAACGTCAACATCAAGTTGGACATCACCTCCCACAACGAGGACTACACCATCGTGGAACAGTAC
GAACGCGCCGAGGGCCGCCACTCCACCGGCGGCATGGACGAGCTGTACAAGTAAGCGGCCGCGT
CGAGTCTAGAGGGCCCGTTTAAACCCGCTGATCAGCCTCGACTGTGCCTTCTAGTTGCCAGCCA
TCTGTTGTTTGCCCCTCCCCCGTGCCTTCCTTGACCCTGGAAGGTGCCACTCCCACTGTCCTTT
CCTAATAAAATGAGGAAATTGCATCGCATTGTCTGAGTAGGTGTCATTCTATTCTGGGGGGTGG
GGTGGGGCAGGACAGCAAGGGGGAGGATTGGGAAGACAATAGCAGGCATGCTGGGGATGCGGTG
GGCTCTATGGATTTGGCTACAGCAACAGGGTGGTGGACCTCATGGCCCACATGGCCTCCAAGGA
GTAAGACCCCTGGACCACCAGCCCCAGCAAGAGCACAAGAGGAAGAGAGAGACCCTCACTGCTG
GGGAGTCCCTGCCACACTCAGTCCCCCACCACACTGAATCTCCCCTCCTCACAGTTGCCATGTA
GACCCCTTGAAGAGGGGGGGGCCTAGGGAGCCGCACCTTGTCATGTACCATCAATAAAGTACC
CTGTGCTCAACCAGTTACTTGTCCTGTCTTATTCTAGGGTCTGGGGCAGAGGGGAGGGAAGCTG
GGCTTGTGTCAAGGTGAGACATTCTTGCTGGGGAGGGACCTGGTATGTTCTCCTCAGACTGAGG
GTAGGGCCTCCAAACAGCCTTGCTTGCTTCGAGAACCATTTGCTTCCCGCTCAGACGTCTTGAG
TGCTACAGGAAGCTGGCACCACTACTTCAGAGAACAAGGCCTTTTCCTCTCCTCGCTCCAGT
exemplary donor template for insertion at GAPDH locus
SEQ ID NO: 44
GAAGACTGTGGATGGCCCCTCCGGGAAACTGTGGCGTGATGGCCGCGGGGCTCTCCAGAACATC
ATCCCTGCCTCTACTGGCGCTGCCAAGGCTGTGGGCAAGGTCATCCCTGAGCTGAACGGGAAGC
TCACTGGCATGGCCTTCCGTGTCCCCACTGCCAACGTGTCAGTGGTGGACCTGACCTGCCGTCT
AGAAAAACCTGCCAAATATGATGACATCAAGAAGGTGGTGAAGCAGGCGTCGGAGGGCCCCCTC
AAGGGCATCCTGGGCTACACTGAGCACCAGGTGGTCTCCTCTGACTTCAACAGCGACACCCACT
CCTCCACCTTTGACGCTGGGGCTGGCATTGCCCTCAACGACCACTTTGTCAAGCTCATTTCCTG
GTATGTGGCTGGGGCCAGAGACTGGCTCTTAAAAAGTGCAGGGTCTGGCGCCCTCTGGTGGCTG
GCTCAGAAAAAGGGCCCTGACAACTCTTTACATCTTCTAGGTATGACAACGAGTTCGGATATAG
CAATAGAGTGGTCGATCTGATGGCTCATATGGCTAGCAAAGAGGGAAGCGGAGCTACTAACTTC
AGCCTGCTGAAGCAGGCTGGAGACGTGGAGGAGAACCCTGGACCTATGGTGAGCAAGGGCGAGG
AGCTGTTCACCGGGGTGGTGCCCATCCTGGTCGAGCTGGACGGCGACGTAAACGGCCACAAGTT
CAGCGTGTCCGGCGAGGGCGAGGGCGATGCCACCTACGGCAAGCTGACCCTGAAGTTCATCTGC
ACCACCGGCAAGCTGCCCGTGCCCTGGCCCACCCTCGTGACCACCCTGACCTACGGCGTGCAGT
GCTTCAGCCGCTACCCCGACCACATGAAGCAGCACGACTTCTTCAAGTCCGCCATGCCCGAAGG
CTACGTCCAGGAGCGCACCATCTTCTTCAAGGACGACGGCAACTACAAGACCCGCGCCGAGGTG
AAGTTCGAGGGCGACACCCTGGTGAACCGCATCGAGCTGAAGGGCATCGACTTCAAGGAGGACG
GCAACATCCTGGGGCACAAGCTGGAGTACAACTACAACAGCCACAACGTCTATATCATGGCCGA
CAAGCAGAAGAACGGCATCAAGGTGAACTTCAAGATCCGCCACAACATCGAGGACGGCAGCGTG
CAGCTCGCCGACCACTACCAGCAGAACACCCCCATCGGCGACGGCCCCGTGCTGCTGCCCGACA
ACCACTACCTGAGCACCCAGTCCGCCCTGAGCAAAGACCCCAACGAGAAGCGCGATCACATGGT
CCTGCTGGAGTTCGTGACCGCCGCCGGGATCACTCTCGGCATGGACGAGCTGTACAAGTGAGCG
GCCGCGTCGAGTCTAGAGGGCCCGTTTAAACCCGCTGATCAGCCTCGACTGTGCCTTCTAGTTG
CCAGCCATCTGTTGTTTGCCCCTCCCCCGTGCCTTCCTTGACCCTGGAAGGTGCCACTCCCACT
GTCCTTTCCTAATAAAATGAGGAAATTGCATCGCATTGTCTGAGTAGGTGTCATTCTATTCTGG
GGGGTGGGGTGGGGCAGGACAGCAAGGGGGAGGATTGGGAAGACAATAGCAGGCATGCTGGGGA
TGCGGTGGGCTCTATGGATTTGGCTACAGCAACAGGGTGGTGGACCTCATGGCCCACATGGCCT
CCAAGGAGTAAGACCCCTGGACCACCAGCCCCAGCAAGAGCACAAGAGGAAGAGAGAGACCCTC
ACTGCTGGGGAGTCCCTGCCACACTCAGTCCCCCACCACACTGAATCTCCCCTCCTCACAGTTG
CCATGTAGACCCCTTGAAGAGGGGAGGGGCCTAGGGAGCCGCACCTTGTCATGTACCATCAATA
AAGTACCCTGTGCTCAACCAGTTACTTGTCCTGTCTTATTCTAGGGTCTGGGGCAGAGGGGAGG
GAAGCTGGGCTTGTGTCAAGGTGAGACATTCTTGCTGGGGAGGGACCTGGTATGTTCTCCTCAG
ACTGAGGGTAGGGCCTCCAAACAGCCTTGCTTGCTTCGAGAACCATTTGCTTCCCGCTCAGACG
TCTTGAGTGCTACAGGAAGCTGGCACCACTACTTCAGAGAACAAGGCCTTTTCCTCTCCTCGCT
CCAGT
exemplary donor template for insertion at GAPDH locus
SEQ ID NO: 45
GAAGACTGTGGATGGCCCCTCCGGGAAACTGTGGCGTGATGGCCGCGGGGCTCTCCAGAACATC
ATCCCTGCCTCTACTGGCGCTGCCAAGGCTGTGGGCAAGGTCATCCCTGAGCTGAACGGGAAGC
TCACTGGCATGGCCTTCCGTGTCCCCACTGCCAACGTGTCAGTGGTGGACCTGACCTGCCGTCT
AGAAAAACCTGCCAAATATGATGACATCAAGAAGGTGGTGAAGCAGGCGTCGGAGGGCCCCCTC
AAGGGCATCCTGGGCTACACTGAGCACCAGGTGGTCTCCTCTGACTTCAACAGCGACACCCACT
CCTCCACCTTTGACGCTGGGGCTGGCATTGCCCTCAACGACCACTTTGTCAAGCTCATTTCCTG
GTATGTGGCTGGGGCCAGAGACTGGCTCTTAAAAAGTGCAGGGTCTGGCGCCCTCTGGTGGCTG
GCTCAGAAAAAGGGCCCTGACAACTCTTTACATCTTCTAGGTATGACAACGAGTTCGGATATAG
CAATAGAGTGGTCGATCTGATGGCTCATATGGCTAGCAAAGAGGGAAGCGGAGCTACTAACTTC
AGCCTGCTGAAGCAGGCTGGAGACGTGGAGGAGAACCCTGGACCTATGGATTGGACCTGGATCC
TGTTTCTGGTGGCCGCTGCCACAAGAGTGCACAGCAATTGGGTCAACGTGATCAGCGACCTGAA
GAAGATCGAGGACCTGATCCAGAGCATGCACATCGACGCCACACTGTACACCGAGTCCGATGTG
CACCCTAGCTGCAAAGTGACCGCCATGAAGTGCTTTCTGCTGGAACTGCAAGTGATCAGCCTGG
AAAGCGGCGACGCCAGCATCCACGATACCGTGGAAAACCTGATCATCCTGGCCAACAACAGCCT
GAGCAGCAACGGCAATGTGACCGAGAGCGGCTGCAAAGAGTGCGAGGAACTGGAAGAGAAGAAC
ATCAAAGAGTTCCTCCAGAGCTTCGTCCACATCGTGCAGATGTTCATCAACACCAGCTCTGGCG
GAGGAAGCGGAGGCGGAGGATCTGGTGGTGGTGGATCTGGCGGCGGTGGTAGTGGCGGAGGTTC
TCTGCAAATCACCTGTCCTCCACCTATGAGCGTGGAACACGCCGACATCTGGGTCAAGAGCTAC
AGCCTGTACAGCAGAGAGCGGTACATCTGCAACAGCGGCTTCAAGAGAAAGGCCGGCACAAGCA
GCCTGACCGAGTGTGTGCTGAACAAGGCCACAAACGTGGCCCACTGGACCACACCTAGCCTGAA
GTGCATCAGAGATCCCGCTCTGGTTCATCAGAGGCCTGCCCCTCCATCTACAGTGACAACAGCT
GGCGTGACCCCTCAGCCTGAGTCTCTGTCTCCATCTGGAAAAGAGCCTGCCGCCAGCTCTCCCA
GCTCTAACAATACTGCTGCCACCACAGCCGCTATCGTGCCTGGATCTCAGCTGATGCCTAGCAA
GAGCCCTAGCACCGGCACAACAGAGATCAGCTCTCACGAGAGCAGCCACGGAACACCTTCTCAG
ACCACCGCCAAGAATTGGGAGCTGACAGCCTCTGCCTCTCATCAGCCACCTGGCGTGTACCCAC
AGGGCCACTCTGATACAACAGTGGCCATCAGCACCAGCACCGTTCTGCTGTGTGGCCTGTCTGC
TGTTAGCCTGCTGGCCTGCTACCTGAAGTCTAGACAGACACCTCCTCTGGCCAGCGTGGAAATG
GAAGCCATGGAAGCTCTGCCTGTCACATGGGGCACCAGCAGCAGAGATGAGGACCTCGAGAATT
GCAGCCACCACCTGTAGGCGGCCGCGTCGAGTCTAGAGGGCCCGTTTAAACCCGCTGATCAGCC
TCGACTGTGCCTTCTAGTTGCCAGCCATCTGTTGTTTGCCCCTCCCCCGTGCCTTCCTTGACCC
TGGAAGGTGCCACTCCCACTGTCCTTTCCTAATAAAATGAGGAAATTGCATCGCATTGTCTGAG
TAGGTGTCATTCTATTCTGGGGGGTGGGGTGGGGCAGGACAGCAAGGGGGAGGATTGGGAAGAC
AATAGCAGGCATGCTGGGGATGCGGTGGGCTCTATGGATTTGGCTACAGCAACAGGGTGGTGGA
CCTCATGGCCCACATGGCCTCCAAGGAGTAAGACCCCTGGACCACCAGCCCCAGCAAGAGCACA
AGAGGAAGAGAGAGACCCTCACTGCTGGGGAGTCCCTGCCACACTCAGTCCCCCACCACACTGA
ATCTCCCCTCCTCACAGTTGCCATGTAGACCCCTTGAAGAGGGGAGGGGCCTAGGGAGCCGCAC
CTTGTCATGTACCATCAATAAAGTACCCTGTGCTCAACCAGTTACTTGTCCTGTCTTATTCTAG
GGTCTGGGGCAGAGGGGAGGGAAGCTGGGCTTGTGTCAAGGTGAGACATTCTTGCTGGGGAGGG
ACCTGGTATGTTCTCCTCAGACTGAGGGTAGGGCCTCCAAACAGCCTTGCTTGCTTCGAGAACC
ATTTGCTTCCCGCTCAGACGTCTTGAGTGCTACAGGAAGCTGGCACCACTACTTCAGAGAACAA
GGCCTTTTCCTCTCCTCGCTCCAGT
exemplary donor template for insertion at GAPDH locus
SEQ ID NO: 46
GGCTTTCCCATAATTTCCTTTCAAGGTGGGGAGGGAGGTAGAGGGGTGATGTGGGGAGTACGCT
GCAGGGCCTCACTCCTTTTGCAGACCACAGTCCATGCCATCACTGCCACCCAGAAGACTGTGGA
TGGCCCCTCCGGGAAACTGTGGCGTGATGGCCGCGGGGCTCTCCAGAACATCATCCCTGCCTCT
ACTGGCGCTGCCAAGGCTGTGGGCAAGGTCATCCCTGAGCTGAACGGGAAGCTCACTGGCATGG
CCTTCCGTGTCCCCACTGCCAACGTGTCAGTGGTGGACCTGACCTGCCGTCTAGAAAAACCTGC
CAAATATGATGACATCAAGAAGGTGGTGAAGCAGGCGTCGGAGGGCCCCCTCAAGGGCATCCTG
GGCTACACTGAGCACCAGGTGGTCTCCTCTGACTTCAACAGCGACACCCACTCCTCCACCTTTG
ACGCTGGGGCTGGCATTGCCCTCAACGACCACTTTGTCAAGCTCATCTCTTGGTACGACAATGA
GTTCGGATATAGCAATAGAGTGGTCGATCTGATGGCTCATATGGCTAGCAAAGAGGGAAGCGGA
GCTACTAACTTCAGCCTGCTGAAGCAGGCTGGAGACGTGGAGGAGAACCCTGGACCTATGGTGA
GCAAGGGCGAGGAGCTGTTCACCGGGGTGGTGCCCATCCTGGTCGAGCTGGACGGCGACGTAAA
CGGCCACAAGTTCAGCGTGTCCGGCGAGGGCGAGGGCGATGCCACCTACGGCAAGCTGACCCTG
AAGTTCATCTGCACCACCGGCAAGCTGCCCGTGCCCTGGCCCACCCTCGTGACCACCCTGACCT
ACGGCGTGCAGTGCTTCAGCCGCTACCCCGACCACATGAAGCAGCACGACTTCTTCAAGTCCGC
CATGCCCGAAGGCTACGTCCAGGAGCGCACCATCTTCTTCAAGGACGACGGCAACTACAAGACC
CGCGCCGAGGTGAAGTTCGAGGGCGACACCCTGGTGAACCGCATCGAGCTGAAGGGCATCGACT
TCAAGGAGGACGGCAACATCCTGGGGCACAAGCTGGAGTACAACTACAACAGCCACAACGTCTA
TATCATGGCCGACAAGCAGAAGAACGGCATCAAGGTGAACTTCAAGATCCGCCACAACATCGAG
GACGGCAGCGTGCAGCTCGCCGACCACTACCAGCAGAACACCCCCATCGGCGACGGCCCCGTGC
TGCTGCCCGACAACCACTACCTGAGCACCCAGTCCGCCCTGAGCAAAGACCCCAACGAGAAGCG
CGATCACATGGTCCTGCTGGAGTTCGTGACCGCCGCCGGGATCACTCTCGGCATGGACGAGCTG
TACAAGTGAGCGGCCGCGTCGAGTCTAGAGGGCCCGTTTAAACCCGCTGATCAGCCTCGACTGT
GCCTTCTAGTTGCCAGCCATCTGTTGTTTGCCCCTCCCCCGTGCCTTCCTTGACCCTGGAAGGT
GCCACTCCCACTGTCCTTTCCTAATAAAATGAGGAAATTGCATCGCATTGTCTGAGTAGGTGTC
ATTCTATTCTGGGGGGGGGGTGGGGCAGGACAGCAAGGGGGAGGATTGGGAAGACAATAGCAG
GCATGCTGGGGATGCGGTGGGCTCTATGGAGACTGGCTCTTAAAAAGTGCAGGGTCTGGCGCCC
TCTGGTGGCTGGCTCAGAAAAAGGGCCCTGACAACTCTTTTCATCTTCTAGGTATGACAACGAA
TTTGGCTACAGCAACAGGGTGGTGGACCTCATGGCCCACATGGCCTCCAAGGAGTAAGACCCCT
GGACCACCAGCCCCAGCAAGAGCACAAGAGGAAGAGAGAGACCCTCACTGCTGGGGAGTCCCTG
CCACACTCAGTCCCCCACCACACTGAATCTCCCCTCCTCACAGTTGCCATGTAGACCCCTTGAA
GAGGGGAGGGGCCTAGGGAGCCGCACCTTGTCATGTACCATCAATAAAGTACCCTGTGCTCAAC
CAGTTACTTGTCCTGTCTTATTCTAGGGTCTGGGGCAGAGGGGAGGGAAGCTGGGCTTGTGTCA
AGGTGAGACATTCTTGCTGGGGAGGGACCTGGTATGTTCTCCTCAGACTGAGGGTAGGGCCTCC
AAACAGCCTTGCTTGCT
exemplary donor template for insertion at TBP locus
SEQ ID NO: 47
GCAGACTTCCATTTACAGTGAGGAGGTGAGCATTGCATTGAACAAAAGATGGCGTTTTCACTTG
GAATTAGTTATCTGAAGCTTTAGGATTCCTCAGCAATATGATTATGAGACAAGAAAGGAAGATT
CAGAAATGAGTCTAGTTGAAGGCAGCAATTCAGAGAAGAAGATTCAGTTGTTATCATTGCCGTC
CTGCTTGGTTTATGGCCTGGTTCAGGACCAAGGAGAGAAGTGTGAATACATGCCTCTTGAGCTA
TAGAATGAGACGCTGGAGTCACTAAGATGATTTTTTAAAAGTATTGTTTTATAAACAAAAATAA
GATTGTGACAAGGGATTCCACTATTAATGTTTTCATGCCTGTGCCTTAATCTGACTGGGTATGG
TGAGAATTGTGCTTGCAGCTTTAAGGTAAGAATTTTACCATCTTAATATGTTAAGAAGTGCCAT
TTCAGTCTCTCATCTCTACTCCAACTTGTCTTCTTAGGTGCTAAAGTCAGAGCCGAAATCTACG
AGGCCTTCGAGAACATCTACCCCATCCTGAAGGGCTTCAGAAAGACCACCGGAAGCGGAGCTAC
TAACTTCAGCCTGCTGAAGCAGGCTGGAGACGTGGAGGAGAACCCTGGACCTATGGTGAGCAAG
GGCGAGGAGCTGTTCACCGGGGTGGTGCCCATCCTGGTCGAGCTGGACGGCGACGTAAACGGCC
ACAAGTTCAGCGTGTCCGGCGAGGGCGAGGGCGATGCCACCTACGGCAAGCTGACCCTGAAGTT
CATCTGCACCACCGGCAAGCTGCCCGTGCCCTGGCCCACCCTCGTGACCACCCTGACCTACGGC
GTGCAGTGCTTCAGCCGCTACCCCGACCACATGAAGCAGCACGACTTCTTCAAGTCCGCCATGC
CCGAAGGCTACGTCCAGGAGCGCACCATCTTCTTCAAGGACGACGGCAACTACAAGACCCGCGC
CGAGGTGAAGTTCGAGGGCGACACCCTGGTGAACCGCATCGAGCTGAAGGGCATCGACTTCAAG
GAGGACGGCAACATCCTGGGGCACAAGCTGGAGTACAACTACAACAGCCACAACGTCTATATCA
TGGCCGACAAGCAGAAGAACGGCATCAAGGTGAACTTCAAGATCCGCCACAACATCGAGGACGG
CAGCGTGCAGCTCGCCGACCACTACCAGCAGAACACCCCCATCGGCGACGGCCCCGTGCTGCTG
CCCGACAACCACTACCTGAGCACCCAGTCCGCCCTGAGCAAAGACCCCAACGAGAAGCGCGATC
ACATGGTCCTGCTGGAGTTCGTGACCGCCGCCGGGATCACTCTCGGCATGGACGAGCTGTACAA
GTGAGCGGCCGCGTCGAGTCTAGAGGGCCCGTTTAAACCCGCTGATCAGCCTCGACTGTGCCTT
CTAGTTGCCAGCCATCTGTTGTTTGCCCCTCCCCCGTGCCTTCCTTGACCCTGGAAGGTGCCAC
TCCCACTGTCCTTTCCTAATAAAATGAGGAAATTGCATCGCATTGTCTGAGTAGGTGTCATTCT
ATTCTGGGGGGTGGGGTGGGGCAGGACAGCAAGGGGGAGGATTGGGAAGACAATAGCAGGCATG
CTGGGGATGCGGTGGGCTCTATGGCAGAAATTTATGAAGCATTTGAAAACATCTACCCTATTCT
AAAGGGATTCAGGAAGACGACGTAATGGCTCTCATGTACCCTTGCCTCCCCCACCCCCTTCTTT
TTTTTTTTTTAAACAAATCAGTTTGTTTTGGTACCTTTAAATGGTGGTGTTGTGAGAAGATGGA
TGTTGAGTTGCAGGGTGTGGCACCAGGTGATGCCCTTCTGTAAGTGCCCACCGCGGGATGCCGG
GAAGGGGCATTATTTGTGCACTGAGAACACCGCGCAGCGTGACTGTGAGTTGCTCATACCGTGC
TGCTATCTGGGCAGCGCTGCCCATTTATTTATATGTAGATTTTAAACACTGCTGTTGACAAGTT
GGTTTGAGGGAGAAAACTTTAAGTGTTAAAGCCACCTCTATAATTGATTGGACTTTTTAATTTT
AATGTTTTTCCCCATGAACCACAGTTTTTATATTTCTACCAGAAAAGTAAAAATCTTTTTTAAA
AGTGTTGTTTTT
exemplary donor template for insertion at TBP locus
SEQ ID NO: 49
CTGACCACAGCTCTGCAAGCAGACTTCCATTTACAGTGAGGAGGTGAGCATTGCATTGAACAAA
AGATGGCGTTTTCACTTGGAATTAGTTATCTGAAGCTTTAGGATTCCTCAGCAATATGATTATG
AGACAAGAAAGGAAGATTCAGAAATGAGTCTAGTTGAAGGCAGCAATTCAGAGAAGAAGATTCA
GTTGTTATCATTGCCGTCCTGCTTGGTTTATGGCCTGGTTCAGGACCAAGGAGAGAAGTGTGAA
TACATGCCTCTTGAGCTATAGAATGAGACGCTGGAGTCACTAAGATGATTTTTTAAAAGTATTG
TTTTATAAACAAAAATAAGATTGTGACAAGGGATTCCACTATTAATGTTTTCATGCCTGTGCCT
TAATCTGACTGGGTATGGTGAGAATTGTGCTTGCAGCTTTAAGGTAAGAATTTTACCATCTTAA
TATGTTAAGAAGTGCCATTTCAGTCTCTCATCTCTACTCCAACTTGTCTTCTTAGGGGCTAAAG
TGCGGGCCGAGATCTACGAGGCCTTCGAGAATATCTACCCCATCCTGAAGGGCTTCAGAAAGAC
CACCGGAAGCGGAGCTACTAACTTCAGCCTGCTGAAGCAGGCTGGAGACGTGGAGGAGAACCCT
GGACCTATGGTGAGCAAGGGCGAGGAGCTGTTCACCGGGGTGGTGCCCATCCTGGTCGAGCTGG
ACGGCGACGTAAACGGCCACAAGTTCAGCGTGTCCGGCGAGGGCGAGGGCGATGCCACCTACGG
CAAGCTGACCCTGAAGTTCATCTGCACCACCGGCAAGCTGCCCGTGCCCTGGCCCACCCTCGTG
ACCACCCTGACCTACGGCGTGCAGTGCTTCAGCCGCTACCCCGACCACATGAAGCAGCACGACT
TCTTCAAGTCCGCCATGCCCGAAGGCTACGTCCAGGAGCGCACCATCTTCTTCAAGGACGACGG
CAACTACAAGACCCGCGCCGAGGTGAAGTTCGAGGGCGACACCCTGGTGAACCGCATCGAGCTG
AAGGGCATCGACTTCAAGGAGGACGGCAACATCCTGGGGCACAAGCTGGAGTACAACTACAACA
GCCACAACGTCTATATCATGGCCGACAAGCAGAAGAACGGCATCAAGGTGAACTTCAAGATCCG
CCACAACATCGAGGACGGCAGCGTGCAGCTCGCCGACCACTACCAGCAGAACACCCCCATCGGC
GACGGCCCCGTGCTGCTGCCCGACAACCACTACCTGAGCACCCAGTCCGCCCTGAGCAAAGACC
CCAACGAGAAGCGCGATCACATGGTCCTGCTGGAGTTCGTGACCGCCGCCGGGATCACTCTCGG
CATGGACGAGCTGTACAAGTGAGCGGCCGCGTCGAGTCTAGAGGGCCCGTTTAAACCCGCTGAT
CAGCCTCGACTGTGCCTTCTAGTTGCCAGCCATCTGTTGTTTGCCCCTCCCCCGTGCCTTCCTT
GACCCTGGAAGGTGCCACTCCCACTGTCCTTTCCTAATAAAATGAGGAAATTGCATCGCATTGT
CTGAGTAGGTGTCATTCTATTCTGGGGGGTGGGGTGGGGCAGGACAGCAAGGGGGAGGATTGGG
AAGACAATAGCAGGCATGCTGGGGATGCGGTGGGCTCTATGGTAGGTGCTAAAGTCAGAGCAGA
AATTTATGAAGCATTTGAAAACATCTACCCTATTCTAAAGGGATTCAGGAAGACGACGTAATGG
CTCTCATGTACCCTTGCCTCCCCCACCCCCTTCTTTTTTTTTTTTTAAACAAATCAGTTTGTTT
TGGTACCTTTAAATGGTGGTGTTGTGAGAAGATGGATGTTGAGTTGCAGGGTGTGGCACCAGGT
GATGCCCTTCTGTAAGTGCCCACCGCGGGATGCCGGGAAGGGGCATTATTTGTGCACTGAGAAC
ACCGCGCAGCGTGACTGTGAGTTGCTCATACCGTGCTGCTATCTGGGCAGCGCTGCCCATTTAT
TTATATGTAGATTTTAAACACTGCTGTTGACAAGTTGGTTTGAGGGAGAAAACTTTAAGTGTTA
AAGCCACCTCTATAATTGATTGGACTTTTTAATTTTAATGTTTTTCCCCATGAACCACAGTTTT
TATATTTCTACCAGAAAAGTAAAAATCTTT
exemplary donor template for insertion at TBP locus
SEQ ID NO: 50
ACAAAAGATGGCGTTTTCACTTGGAATTAGTTATCTGAAGCTTTAGGATTCCTCAGCAATATGA
TTATGAGACAAGAAAGGAAGATTCAGAAATGAGTCTAGTTGAAGGCAGCAATTCAGAGAAGAAG
ATTCAGTTGTTATCATTGCCGTCCTGCTTGGTTTATGGCCTGGTTCAGGACCAAGGAGAGAAGT
GTGAATACATGCCTCTTGAGCTATAGAATGAGACGCTGGAGTCACTAAGATGATTTTTTAAAAG
TATTGTTTTATAAACAAAAATAAGATTGTGACAAGGGATTCCACTATTAATGTTTTCATGCCTG
TGCCTTAATCTGACTGGGTATGGTGAGAATTGTGCTTGCAGCTTTAAGGTAAGAATTTTACCAT
CTTAATATGTTAAGAAGTGCCATTTCAGTCTCTCATCTCTACTCCAACTTGTCTTCTTAGGTGC
TAAAGTCAGAGCAGAAATTTATGAAGCATTCGAGAACATCTACCCTATTCTAAAGGGATTCAGG
AAGACGACGGGAAGCGGAGCTACTAACTTCAGCCTGCTGAAGCAGGCTGGAGACGTGGAGGAGA
ACCCTGGACCTATGGTGAGCAAGGGCGAGGAGCTGTTCACCGGGGTGGTGCCCATCCTGGTCGA
GCTGGACGGCGACGTAAACGGCCACAAGTTCAGCGTGTCCGGCGAGGGCGAGGGCGATGCCACC
TACGGCAAGCTGACCCTGAAGTTCATCTGCACCACCGGCAAGCTGCCCGTGCCCTGGCCCACCC
TCGTGACCACCCTGACCTACGGCGTGCAGTGCTTCAGCCGCTACCCCGACCACATGAAGCAGCA
CGACTTCTTCAAGTCCGCCATGCCCGAAGGCTACGTCCAGGAGCGCACCATCTTCTTCAAGGAC
GACGGCAACTACAAGACCCGCGCCGAGGTGAAGTTCGAGGGCGACACCCTGGTGAACCGCATCG
AGCTGAAGGGCATCGACTTCAAGGAGGACGGCAACATCCTGGGGCACAAGCTGGAGTACAACTA
CAACAGCCACAACGTCTATATCATGGCCGACAAGCAGAAGAACGGCATCAAGGTGAACTTCAAG
ATCCGCCACAACATCGAGGACGGCAGCGTGCAGCTCGCCGACCACTACCAGCAGAACACCCCCA
TCGGCGACGGCCCCGTGCTGCTGCCCGACAACCACTACCTGAGCACCCAGTCCGCCCTGAGCAA
AGACCCCAACGAGAAGCGCGATCACATGGTCCTGCTGGAGTTCGTGACCGCCGCCGGGATCACT
CTCGGCATGGACGAGCTGTACAAGTGAGCGGCCGCGTCGAGTCTAGAGGGCCCGTTTAAACCCG
CTGATCAGCCTCGACTGTGCCTTCTAGTTGCCAGCCATCTGTTGTTTGCCCCTCCCCCGTGCCT
TCCTTGACCCTGGAAGGTGCCACTCCCACTGTCCTTTCCTAATAAAATGAGGAAATTGCATCGC
ATTGTCTGAGTAGGTGTCATTCTATTCTGGGGGGTGGGGTGGGGCAGGACAGCAAGGGGGAGGA
TTGGGAAGACAATAGCAGGCATGCTGGGGATGCGGTGGGCTCTATGGAAGGGATTCAGGAAGAC
GACGTAATGGCTCTCATGTACCCTTGCCTCCCCCACCCCCTTCTTTTTTTTTTTTTAAACAAAT
CAGTTTGTTTTGGTACCTTTAAATGGTGGTGTTGTGAGAAGATGGATGTTGAGTTGCAGGGTGT
GGCACCAGGTGATGCCCTTCTGTAAGTGCCCACCGCGGGATGCCGGGAAGGGGCATTATTTGTG
CACTGAGAACACCGCGCAGCGTGACTGTGAGTTGCTCATACCGTGCTGCTATCTGGGCAGCGCT
GCCCATTTATTTATATGTAGATTTTAAACACTGCTGTTGACAAGTTGGTTTGAGGGAGAAAACT
TTAAGTGTTAAAGCCACCTCTATAATTGATTGGACTTTTTAATTTTAATGTTTTTCCCCATGAA
CCACAGTTTTTATATTTCTACCAGAAAAGTAAAAATCTTTTTTAAAAGTGTTGTTTTTCTAATT
TATAACTCCTAGGGGTTATTTCTGTGCCAGACACA
exemplary donor template for insertion at G6PD locus
SEQ ID NO: 51
GGCCCGGGGGACTCCACATGGTGGCAGGCAGTGGCATCAGCAAGACACTCTCTCCCTCACAGAA
CGTGAAGCTCCCTGACGCCTATGAGCGCCTCATCCTGGACGTCTTCTGCGGGAGCCAGATGCAC
TTCGTGCGCAGGTGAGGCCCAGCTGCCGGCCCCTGCATACCTGTGGGCTATGGGGTGGCCTTTG
CCCTCCCTCCCTGTGTGCCACCGGCCTCCCAAGCCATACCATGTCCCCTCAGCGACGAGCTCCG
TGAGGCCTGGCGTATTTTCACCCCACTGCTGCACCAGATTGAGCTGGAGAAGCCCAAGCCCATC
CCCTATATTTATGGCAGGTGAGGAAAGGGTGGGGGCTGGGGACAGAGCCCAGCGGGCAGGGGCG
GGGTGAGGGTGGAGCTACCTCATGCCTCTCCTCCACCCGTCACTCTCCAGCCGAGGCCCCACGG
AGGCAGACGAGCTGATGAAGAGAGTGGGCTTCCAGTACGAGGGAACCTACAAATGGGTCAACCC
TCACAAGCTGGGAAGCGGAGCTACTAACTTCAGCCTGCTGAAGCAGGCTGGAGACGTGGAGGAG
AACCCTGGACCTATGGTGAGCAAGGGCGAGGAGCTGTTCACCGGGGTGGTGCCCATCCTGGTCG
AGCTGGACGGCGACGTAAACGGCCACAAGTTCAGCGTGTCCGGCGAGGGCGAGGGCGATGCCAC
CTACGGCAAGCTGACCCTGAAGTTCATCTGCACCACCGGCAAGCTGCCCGTGCCCTGGCCCACC
CTCGTGACCACCCTGACCTACGGCGTGCAGTGCTTCAGCCGCTACCCCGACCACATGAAGCAGC
ACGACTTCTTCAAGTCCGCCATGCCCGAAGGCTACGTCCAGGAGCGCACCATCTTCTTCAAGGA
CGACGGCAACTACAAGACCCGCGCCGAGGTGAAGTTCGAGGGCGACACCCTGGTGAACCGCATC
GAGCTGAAGGGCATCGACTTCAAGGAGGACGGCAACATCCTGGGGCACAAGCTGGAGTACAACT
ACAACAGCCACAACGTCTATATCATGGCCGACAAGCAGAAGAACGGCATCAAGGTGAACTTCAA
GATCCGCCACAACATCGAGGACGGCAGCGTGCAGCTCGCCGACCACTACCAGCAGAACACCCCC
ATCGGCGACGGCCCCGTGCTGCTGCCCGACAACCACTACCTGAGCACCCAGTCCGCCCTGAGCA
AAGACCCCAACGAGAAGCGCGATCACATGGTCCTGCTGGAGTTCGTGACCGCCGCCGGGATCAC
TCTCGGCATGGACGAGCTGTACAAGTGAGCGGCCGCGTCGAGTCTAGAGGGCCCGTTTAAACCC
GCTGATCAGCCTCGACTGTGCCTTCTAGTTGCCAGCCATCTGTTGTTTGCCCCTCCCCCGTGCC
TTCCTTGACCCTGGAAGGTGCCACTCCCACTGTCCTTTCCTAATAAAATGAGGAAATTGCATCG
CATTGTCTGAGTAGGTGTCATTCTATTCTGGGGGGTGGGGTGGGGCAGGACAGCAAGGGGGAGG
ATTGGGAAGACAATAGCAGGCATGCTGGGGATGCGGTGGGCTCTATGGGTGGGTGAACCCCCAC
AAGCTCTGAGCCCTGGGCACCCACCTCCACCCCCGCCACGGCCACCCTCCTTCCCGCCGCCCGA
CCCCGAGTCGGGAGGACTCCGGGACCATTGACCTCAGCTGCACATTCCTGGCCCCGGGCTCTGG
CCACCCTGGCCCGCCCCTCGCTGCTGCTACTACCCGAGCCCAGCTACATTCCTCAGCTGCCAAG
CACTCGAGACCATCCTGGCCCCTCCAGACCCTGCCTGAGCCCAGGAGCTGAGTCACCTCCTCCA
CTCACTCCAGCCCAACAGAAGGAAGGAGGAGGGCGCCCATTCGTCTGTCCCAGAGCTTATTGGC
CACTGGGTCTCACTCCTGAGTGGGGCCAGGGTGGGAGGGAGGGACGAGGGGGAGGAAAGGGGCG
AGCACCCACGTGAGAGAATCTGCCTGTGGCCTTGCCCGCCAGCCTCAGTGCCACTTGACATTCC
TTGTCACCAGCAACATCTCGAGCCCCCTGGATGTCC
exemplary donor template for insertion at E2F4 locus
SEQ ID NO: 52
CCAGGGGGCTGTAGTGGGGCCAGGCTGGACCTCTGTGCCCTGAGCATGGCTTTCTTGTTTTTCA
GTTTTGGAACTCCCCAAAGAGCTGTCAGAAATCTTTGATCCCACACGAGGTAGGCTGCTGCATT
CCTCCCTGAGGCTAGGGGTAAGGGACACAGCTCATTGGGTCCTATGGCTGTTTTCTTGCCCTTT
TGAGGACCTTGTTGTGGCGCTTATGGTAACTGGGGCAAAGGGTGAAGTTCCTGATGGGCAGGTG
GGGTTCCCTTTCCTGGGCTTTGGTGGGTGGAGAGGTGGGAGCTGGAATGTTAGTAACTGAGCTC
CCTCCATTCCCAGAGTGCATGAGCTCGGAGCTGCTGGAGGAGTTGATGTCCTCAGAAGGTGGGT
GGCCCTGGAAGGTGGGAGTGGGTGTGGGCAGGGGTTGGGCTGCTGCTAGGGGAGCCCTGGCCCA
GGGCCTGAGACTAGTGCTCTCTGCAGTGTTCGCCCCTCTGCTGAGACTTTCTCCTCCTCCTGGC
GACCACGACTACATCTACAACCTGGACGAGAGCGAGGGCGTGTGCGACCTGTTTGATGTGCCCG
TGCTGAACCTGGGAAGCGGAGCTACTAACTTCAGCCTGCTGAAGCAGGCTGGAGACGTGGAGGA
GAACCCTGGACCTATGGTGAGCAAGGGCGAGGAGCTGTTCACCGGGGTGGTGCCCATCCTGGTC
GAGCTGGACGGCGACGTAAACGGCCACAAGTTCAGCGTGTCCGGCGAGGGCGAGGGCGATGCCA
CCTACGGCAAGCTGACCCTGAAGTTCATCTGCACCACCGGCAAGCTGCCCGTGCCCTGGCCCAC
CCTCGTGACCACCCTGACCTACGGCGTGCAGTGCTTCAGCCGCTACCCCGACCACATGAAGCAG
CACGACTTCTTCAAGTCCGCCATGCCCGAAGGCTACGTCCAGGAGCGCACCATCTTCTTCAAGG
ACGACGGCAACTACAAGACCCGCGCCGAGGTGAAGTTCGAGGGCGACACCCTGGTGAACCGCAT
CGAGCTGAAGGGCATCGACTTCAAGGAGGACGGCAACATCCTGGGGCACAAGCTGGAGTACAAC
TACAACAGCCACAACGTCTATATCATGGCCGACAAGCAGAAGAACGGCATCAAGGTGAACTTCA
AGATCCGCCACAACATCGAGGACGGCAGCGTGCAGCTCGCCGACCACTACCAGCAGAACACCCC
CATCGGCGACGGCCCCGTGCTGCTGCCCGACAACCACTACCTGAGCACCCAGTCCGCCCTGAGC
AAAGACCCCAACGAGAAGCGCGATCACATGGTCCTGCTGGAGTTCGTGACCGCCGCCGGGATCA
CTCTCGGCATGGACGAGCTGTACAAGTGAGCGGCCGCGTCGAGTCTAGAGGGCCCGTTTAAACC
CGCTGATCAGCCTCGACTGTGCCTTCTAGTTGCCAGCCATCTGTTGTTTGCCCCTCCCCCGTGC
CTTCCTTGACCCTGGAAGGTGCCACTCCCACTGTCCTTTCCTAATAAAATGAGGAAATTGCATC
GCATTGTCTGAGTAGGTGTCATTCTATTCTGGGGGGTGGGGTGGGGCAGGACAGCAAGGGGGAG
GATTGGGAAGACAATAGCAGGCATGCTGGGGATGCGGTGGGCTCTATGGCCACCCCCGGGAGAC
CACGATTATATCTACAACCTGGACGAGAGTGAAGGTGTCTGTGACCTCTTTGATGTGCCTGTTC
TCAACCTCTGACTGACAGGGACATGCCCTGTGTGGCTGGGACCCAGACTGTCTGACCTGGGGGT
TGCCTGGGGACCTCTCCCACCCGACCCCTACAGAGCTTGAGAGCCACAGACGCCTGGCTTCTCC
GGCCTCCCCTCACCGCACAGTTCTGGCCACAGCTCCCGCTCCTGTGCTGGCACTTCTGTGCTCG
CAGAGCAGGGGAACAGGACTCAGCCCCCATCACCGTGGAGCCAAAGTGTTTGCTTCTCCCTTTC
TGCGGCCTTCGCCAGCCCAGGCTCGGCTGCCACCCAGTGGCACAGAACCGAGGAGCTGCCATTA
CCCCCCATAGGGGGCAGTGTCTTGTTCCTGCCAGCCTCAGTGTCTTGCTTCTGCCAGCTCCTTC
CCCTAGGAGGGAAGGGTGGGGTGGAACTGGGCACATG
exemplary donor template for insertion at E2F4 locus
SEQ ID NO: 53
CCAGGCTGGACCTCTGTGCCCTGAGCATGGCTTTCTTGTTTTTCAGTTTTGGAACTCCCCAAAG
AGCTGTCAGAAATCTTTGATCCCACACGAGGTAGGCTGCTGCATTCCTCCCTGAGGCTAGGGGT
AAGGGACACAGCTCATTGGGTCCTATGGCTGTTTTCTTGCCCTTTTGAGGACCTTGTTGTGGCG
CTTATGGTAACTGGGGCAAAGGGTGAAGTTCCTGATGGGCAGGTGGGGTTCCCTTTCCTGGGCT
TTGGTGGGTGGAGAGGTGGGAGCTGGAATGTTAGTAACTGAGCTCCCTCCATTCCCAGAGTGCA
TGAGCTCGGAGCTGCTGGAGGAGTTGATGTCCTCAGAAGGTGGGTGGCCCTGGAAGGTGGGAGT
GGGTGTGGGCAGGGGTTGGGCTGCTGCTAGGGGAGCCCTGGCCCAGGGCCTGAGACTAGTGCTC
TCTGCAGTGTTTGCCCCTCTGCTTCGTCTTAGTCCTCCTCCGGGCGACCACGACTACATCTACA
ACCTGGACGAGAGCGAGGGCGTGTGCGACCTGTTTGATGTGCCCGTGCTGAACCTGGGAAGCGG
AGCTACTAACTTCAGCCTGCTGAAGCAGGCTGGAGACGTGGAGGAGAACCCTGGACCTATGGTG
AGCAAGGGCGAGGAGCTGTTCACCGGGGTGGTGCCCATCCTGGTCGAGCTGGACGGCGACGTAA
ACGGCCACAAGTTCAGCGTGTCCGGCGAGGGCGAGGGCGATGCCACCTACGGCAAGCTGACCCT
GAAGTTCATCTGCACCACCGGCAAGCTGCCCGTGCCCTGGCCCACCCTCGTGACCACCCTGACC
TACGGCGTGCAGTGCTTCAGCCGCTACCCCGACCACATGAAGCAGCACGACTTCTTCAAGTCCG
CCATGCCCGAAGGCTACGTCCAGGAGCGCACCATCTTCTTCAAGGACGACGGCAACTACAAGAC
CCGCGCCGAGGTGAAGTTCGAGGGCGACACCCTGGTGAACCGCATCGAGCTGAAGGGCATCGAC
TTCAAGGAGGACGGCAACATCCTGGGGCACAAGCTGGAGTACAACTACAACAGCCACAACGTCT
ATATCATGGCCGACAAGCAGAAGAACGGCATCAAGGTGAACTTCAAGATCCGCCACAACATCGA
GGACGGCAGCGTGCAGCTCGCCGACCACTACCAGCAGAACACCCCCATCGGCGACGGCCCCGTG
CTGCTGCCCGACAACCACTACCTGAGCACCCAGTCCGCCCTGAGCAAAGACCCCAACGAGAAGC
GCGATCACATGGTCCTGCTGGAGTTCGTGACCGCCGCCGGGATCACTCTCGGCATGGACGAGCT
GTACAAGTGAGCGGCCGCGTCGAGTCTAGAGGGCCCGTTTAAACCCGCTGATCAGCCTCGACTG
TGCCTTCTAGTTGCCAGCCATCTGTTGTTTGCCCCTCCCCCGTGCCTTCCTTGACCCTGGAAGG
TGCCACTCCCACTGTCCTTTCCTAATAAAATGAGGAAATTGCATCGCATTGTCTGAGTAGGTGT
CATTCTATTCTGGGGGGTGGGGTGGGGCAGGACAGCAAGGGGGAGGATTGGGAAGACAATAGCA
GGCATGCTGGGGATGCGGTGGGCTCTATGGATTATATCTACAACCTGGACGAGAGTGAAGGTGT
CTGTGACCTCTTTGATGTGCCTGTTCTCAACCTCTGACTGACAGGGACATGCCCTGTGTGGCTG
GGACCCAGACTGTCTGACCTGGGGGTTGCCTGGGGACCTCTCCCACCCGACCCCTACAGAGCTT
GAGAGCCACAGACGCCTGGCTTCTCCGGCCTCCCCTCACCGCACAGTTCTGGCCACAGCTCCCG
CTCCTGTGCTGGCACTTCTGTGCTCGCAGAGCAGGGGAACAGGACTCAGCCCCCATCACCGTGG
AGCCAAAGTGTTTGCTTCTCCCTTTCTGCGGCCTTCGCCAGCCCAGGCTCGGCTGCCACCCAGT
GGCACAGAACCGAGGAGCTGCCATTACCCCCCATAGGGGGCAGTGTCTTGTTCCTGCCAGCCTC
AGTGTCTTGCTTCTGCCAGCTCCTTCCCCTAGGAGGGAAGGGTGGGGTGGAACTGGGCACATGC
CAGCACCACTTCTAGCTT
exemplary donor template for insertion at E2F4 locus
SEQ ID NO: 54
GTCAGAAATCTTTGATCCCACACGAGGTAGGCTGCTGCATTCCTCCCTGAGGCTAGGGGTAAGG
GACACAGCTCATTGGGTCCTATGGCTGTTTTCTTGCCCTTTTGAGGACCTTGTTGTGGCGCTTA
TGGTAACTGGGGCAAAGGGTGAAGTTCCTGATGGGCAGGTGGGGTTCCCTTTCCTGGGCTTTGG
TGGGTGGAGAGGTGGGAGCTGGAATGTTAGTAACTGAGCTCCCTCCATTCCCAGAGTGCATGAG
CTCGGAGCTGCTGGAGGAGTTGATGTCCTCAGAAGGTGGGTGGCCCTGGAAGGTGGGAGTGGGT
GTGGGCAGGGGTTGGGCTGCTGCTAGGGGAGCCCTGGCCCAGGGCCTGAGACTAGTGCTCTCTG
CAGTGTTTGCCCCTCTGCTTCGTCTTTCTCCACCCCCGGGAGACCACGATTATATCTACAACCT
GGACGAGAGTGAAGGTGTCTGTGACCTCTTCGACGTGCCCGTGCTCAACCTCGGAAGCGGAGCT
ACTAACTTCAGCCTGCTGAAGCAGGCTGGAGACGTGGAGGAGAACCCTGGACCTATGGTGAGCA
AGGGCGAGGAGCTGTTCACCGGGGTGGTGCCCATCCTGGTCGAGCTGGACGGCGACGTAAACGG
CCACAAGTTCAGCGTGTCCGGCGAGGGCGAGGGCGATGCCACCTACGGCAAGCTGACCCTGAAG
TTCATCTGCACCACCGGCAAGCTGCCCGTGCCCTGGCCCACCCTCGTGACCACCCTGACCTACG
GCGTGCAGTGCTTCAGCCGCTACCCCGACCACATGAAGCAGCACGACTTCTTCAAGTCCGCCAT
GCCCGAAGGCTACGTCCAGGAGCGCACCATCTTCTTCAAGGACGACGGCAACTACAAGACCCGC
GCCGAGGTGAAGTTCGAGGGCGACACCCTGGTGAACCGCATCGAGCTGAAGGGCATCGACTTCA
AGGAGGACGGCAACATCCTGGGGCACAAGCTGGAGTACAACTACAACAGCCACAACGTCTATAT
CATGGCCGACAAGCAGAAGAACGGCATCAAGGTGAACTTCAAGATCCGCCACAACATCGAGGAC
GGCAGCGTGCAGCTCGCCGACCACTACCAGCAGAACACCCCCATCGGCGACGGCCCCGTGCTGC
TGCCCGACAACCACTACCTGAGCACCCAGTCCGCCCTGAGCAAAGACCCCAACGAGAAGCGCGA
TCACATGGTCCTGCTGGAGTTCGTGACCGCCGCCGGGATCACTCTCGGCATGGACGAGCTGTAC
AAGTGAGCGGCCGCGTCGAGTCTAGAGGGCCCGTTTAAACCCGCTGATCAGCCTCGACTGTGCC
TTCTAGTTGCCAGCCATCTGTTGTTTGCCCCTCCCCCGTGCCTTCCTTGACCCTGGAAGGTGCC
ACTCCCACTGTCCTTTCCTAATAAAATGAGGAAATTGCATCGCATTGTCTGAGTAGGTGTCATT
CTATTCTGGGGGGTGGGGTGGGGCAGGACAGCAAGGGGGAGGATTGGGAAGACAATAGCAGGCA
TGCTGGGGATGCGGTGGGCTCTATGGTGACTGACAGGGACATGCCCTGTGTGGCTGGGACCCAG
ACTGTCTGACCTGGGGGTTGCCTGGGGACCTCTCCCACCCGACCCCTACAGAGCTTGAGAGCCA
CAGACGCCTGGCTTCTCCGGCCTCCCCTCACCGCACAGTTCTGGCCACAGCTCCCGCTCCTGTG
CTGGCACTTCTGTGCTCGCAGAGCAGGGGAACAGGACTCAGCCCCCATCACCGTGGAGCCAAAG
TGTTTGCTTCTCCCTTTCTGCGGCCTTCGCCAGCCCAGGCTCGGCTGCCACCCAGTGGCACAGA
ACCGAGGAGCTGCCATTACCCCCCATAGGGGGCAGTGTCTTGTTCCTGCCAGCCTCAGTGTCTT
GCTTCTGCCAGCTCCTTCCCCTAGGAGGGAAGGGTGGGGTGGAACTGGGCACATGCCAGCACCA
CTTCTAGCTTCCTTCGCTATCCCCCACCCCCTGACCCTCCAGCTCCTCCTGGCCCTCTCACGTG
CCCACTTCTGCTGG
exemplary donor template for insertion at KIF11 locus
SEQ ID NO: 55
AGAGCAGGGTTTCTTGACAGCAGTGCTATTGGCATTTTAAACTGGATAATTCTTTGTTGTGATG
GGCTTTCCTGTGGACTGTACTATGTTGGTACACAAGAAAAACAGTGTACTATGTGAATACTCAC
TCAAAGCCAGTAGCACTCCCTGATTGTAACACCAAAAAAGTCTCTCAGCATTGCCAAATGTCCC
CTGTGGCAGCAGAATCACTCCCTGATGAGAACCACTACCCTGGAGTAAAATCTATAACTATGTC
TTAGAAAATAACACAGAAAATTAATATTTCTTTCACTCTACTCCTTCCATTAGTGATCAAATAA
AGAAGGCATTTGGCGCTACTTGCCAAATTGTTGGCTCAAACTTGTGCTGAACCTTTTTTGGTTT
TCTACACTTAAGTTTTTTTGCCTATAACCCAGAGAACTTTGAAAATAGAGTGTAGTTAATGTGT
ATCTAATGTTACTTTGTATTGACTTAATTTACCGGCCTTTAATCCACAGCATAAGAAGTCCCAC
GGCAAGGACAAAGAGAACCGGGGCATCAACACACTGGAACGGTCCAAGGTCGAGGAAACAACCG
AGCACCTGGTCACCAAGAGCAGACTGCCTCTGAGAGCCCAGATCAACCTGGGAAGCGGAGCTAC
TAACTTCAGCCTGCTGAAGCAGGCTGGAGACGTGGAGGAGAACCCTGGACCTATGGTGAGCAAG
GGCGAGGAGCTGTTCACCGGGGTGGTGCCCATCCTGGTCGAGCTGGACGGCGACGTAAACGGCC
ACAAGTTCAGCGTGTCCGGCGAGGGCGAGGGCGATGCCACCTACGGCAAGCTGACCCTGAAGTT
CATCTGCACCACCGGCAAGCTGCCCGTGCCCTGGCCCACCCTCGTGACCACCCTGACCTACGGC
GTGCAGTGCTTCAGCCGCTACCCCGACCACATGAAGCAGCACGACTTCTTCAAGTCCGCCATGC
CCGAAGGCTACGTCCAGGAGCGCACCATCTTCTTCAAGGACGACGGCAACTACAAGACCCGCGC
CGAGGTGAAGTTCGAGGGCGACACCCTGGTGAACCGCATCGAGCTGAAGGGCATCGACTTCAAG
GAGGACGGCAACATCCTGGGGCACAAGCTGGAGTACAACTACAACAGCCACAACGTCTATATCA
TGGCCGACAAGCAGAAGAACGGCATCAAGGTGAACTTCAAGATCCGCCACAACATCGAGGACGG
CAGCGTGCAGCTCGCCGACCACTACCAGCAGAACACCCCCATCGGCGACGGCCCCGTGCTGCTG
CCCGACAACCACTACCTGAGCACCCAGTCCGCCCTGAGCAAAGACCCCAACGAGAAGCGCGATC
ACATGGTCCTGCTGGAGTTCGTGACCGCCGCCGGGATCACTCTCGGCATGGACGAGCTGTACAA
GTGAGCGGCCGCGTCGAGTCTAGAGGGCCCGTTTAAACCCGCTGATCAGCCTCGACTGTGCCTT
CTAGTTGCCAGCCATCTGTTGTTTGCCCCTCCCCCGTGCCTTCCTTGACCCTGGAAGGTGCCAC
TCCCACTGTCCTTTCCTAATAAAATGAGGAAATTGCATCGCATTGTCTGAGTAGGTGTCATTCT
ATTCTGGGGGGTGGGGTGGGGCAGGACAGCAAGGGGGAGGATTGGGAAGACAATAGCAGGCATG
CTGGGGATGCGGTGGGCTCTATGGAAAAAATCACATGGAAAAGACAAAGAAAACAGAGGCATTA
ACACACTGGAGAGGTCTAAAGTGGAAGAAACTACAGAGCACTTGGTTACAAAGAGCAGATTACC
TCTGCGAGCCCAGATCAACCTTTAATTCACTTGGGGGTTGGCAATTTTATTTTTAAAGAAAACT
TAAAAATAAAACCTGAAACCCCAGAACTTGAGCCTTGTGTATAGATTTTAAAAGAATATATATA
TCAGCCGGGCGCGGTGGCTCATGCCTGTAATCCCAGCACTTTGGGAGGCTGAGGCGGGTGGATT
GCTTGAGCCCAGGAGTTTGAGACCAGCCTGGCCAACGTGGCAAAACCTCGTCTCTGTTAAAAAT
TAGCCGGGCGTGGTGGCACACTCCTGTAATCCCAGCTACTGGGGAGGCTGAGGCACGAGAATCA
CTTGAACCCAGGAAGCGGGGTTGCAGTGAGCCAAAGGTACACCACTACACTCCAGCCTGGGCAA
CAGAGCAAGACT
exemplary donor template for insertion at KIF11 locus
SEQ ID NO: 56
TTCCTGTGGACTGTACTATGTTGGTACACAAGAAAAACAGTGTACTATGTGAATACTCACTCAA
AGCCAGTAGCACTCCCTGATTGTAACACCAAAAAAGTCTCTCAGCATTGCCAAATGTCCCCTGT
GGCAGCAGAATCACTCCCTGATGAGAACCACTACCCTGGAGTAAAATCTATAACTATGTCTTAG
AAAATAACACAGAAAATTAATATTTCTTTCACTCTACTCCTTCCATTAGTGATCAAATAAAGAA
GGCATTTGGCGCTACTTGCCAAATTGTTGGCTCAAACTTGTGCTGAACCTTTTTTGGTTTTCTA
CACTTAAGTTTTTTTGCCTATAACCCAGAGAACTTTGAAAATAGAGTGTAGTTAATGTGTATCT
AATGTTACTTTGTATTGACTTAATTTTCCCGCCTTAAATCCACAGCATAAAAAATCACATGGAA
AAGACAAAGAAAACAGAGGCATTAACACACTGGAGAGGTCTAAAGTGGAAGAAACAACCGAGCA
CCTGGTCACCAAGAGCAGACTGCCTCTGAGAGCCCAGATCAACCTGGGAAGCGGAGCTACTAAC
TTCAGCCTGCTGAAGCAGGCTGGAGACGTGGAGGAGAACCCTGGACCTATGGTGAGCAAGGGCG
AGGAGCTGTTCACCGGGGTGGTGCCCATCCTGGTCGAGCTGGACGGCGACGTAAACGGCCACAA
GTTCAGCGTGTCCGGCGAGGGCGAGGGCGATGCCACCTACGGCAAGCTGACCCTGAAGTTCATC
TGCACCACCGGCAAGCTGCCCGTGCCCTGGCCCACCCTCGTGACCACCCTGACCTACGGCGTGC
AGTGCTTCAGCCGCTACCCCGACCACATGAAGCAGCACGACTTCTTCAAGTCCGCCATGCCCGA
AGGCTACGTCCAGGAGCGCACCATCTTCTTCAAGGACGACGGCAACTACAAGACCCGCGCCGAG
GTGAAGTTCGAGGGCGACACCCTGGTGAACCGCATCGAGCTGAAGGGCATCGACTTCAAGGAGG
ACGGCAACATCCTGGGGCACAAGCTGGAGTACAACTACAACAGCCACAACGTCTATATCATGGC
CGACAAGCAGAAGAACGGCATCAAGGTGAACTTCAAGATCCGCCACAACATCGAGGACGGCAGC
GTGCAGCTCGCCGACCACTACCAGCAGAACACCCCCATCGGCGACGGCCCCGTGCTGCTGCCCG
ACAACCACTACCTGAGCACCCAGTCCGCCCTGAGCAAAGACCCCAACGAGAAGCGCGATCACAT
GGTCCTGCTGGAGTTCGTGACCGCCGCCGGGATCACTCTCGGCATGGACGAGCTGTACAAGTGA
GCGGCCGCGTCGAGTCTAGAGGGCCCGTTTAAACCCGCTGATCAGCCTCGACTGTGCCTTCTAG
TTGCCAGCCATCTGTTGTTTGCCCCTCCCCCGTGCCTTCCTTGACCCTGGAAGGTGCCACTCCC
ACTGTCCTTTCCTAATAAAATGAGGAAATTGCATCGCATTGTCTGAGTAGGTGTCATTCTATTC
TGGGGGGTGGGGTGGGGCAGGACAGCAAGGGGGAGGATTGGGAAGACAATAGCAGGCATGCTGG
GGATGCGGTGGGCTCTATGGAACTACAGAGCACTTGGCTACATAGAGCAGATTACCTCTGCGAG
CCCAGATCAACCTTTAATTCACTTGGGGGTTGGCAATTTTATTTTTAAAGAAAACTTAAAAATA
AAACCTGAAACCCCAGAACTTGAGCCTTGTGTATAGATTTTAAAAGAATATATATATCAGCCGG
GCGCGGTGGCTCATGCCTGTAATCCCAGCACTTTGGGAGGCTGAGGCGGGTGGATTGCTTGAGC
CCAGGAGTTTGAGACCAGCCTGGCCAACGTGGCAAAACCTCGTCTCTGTTAAAAATTAGCCGGG
CGTGGTGGCACACTCCTGTAATCCCAGCTACTGGGGAGGCTGAGGCACGAGAATCACTTGAACC
CAGGAAGCGGGGTTGCAGTGAGCCAAAGGTACACCACTACACTCCAGCCTGGGCAACAGAGCAA
GACTCGGTCTCAAAAACAAAATTTAAAAAAGATATAAGGCAGTACTGTAAATTCAGTTGAATTT
TGATATCT
exemplary donor template for insertion at KIF11 locus
SEQ ID NO: 57
TTAAACTGGATAATTCTTTGTTGTGATGGGCTTTCCTGTGGACTGTACTATGTTGGTACACAAG
AAAAACAGTGTACTATGTGAATACTCACTCAAAGCCAGTAGCACTCCCTGATTGTAACACCAAA
AAAGTCTCTCAGCATTGCCAAATGTCCCCTGTGGCAGCAGAATCACTCCCTGATGAGAACCACT
ACCCTGGAGTAAAATCTATAACTATGTCTTAGAAAATAACACAGAAAATTAATATTTCTTTCAC
TCTACTCCTTCCATTAGTGATCAAATAAAGAAGGCATTTGGCGCTACTTGCCAAATTGTTGGCT
CAAACTTGTGCTGAACCTTTTTTGGTTTTCTACACTTAAGTTTTTTTGCCTATAACCCAGAGAA
CTTTGAAAATAGAGTGTAGTTAATGTGTATCTAATGTTACTTTGTATTGACTTAATTTTCCCGC
CTTAAATCCACAGCATAAAAAATCACATGGAAAAGACAAAGAAAACAGAGGCATCAACACACTG
GAACGGTCCAAGGTCGAGGAAACAACCGAGCACCTGGTCACCAAGAGCAGACTGCCTCTGAGAG
CCCAGATCAACCTGGGAAGCGGAGCTACTAACTTCAGCCTGCTGAAGCAGGCTGGAGACGTGGA
GGAGAACCCTGGACCTATGGTGAGCAAGGGCGAGGAGCTGTTCACCGGGGTGGTGCCCATCCTG
GTCGAGCTGGACGGCGACGTAAACGGCCACAAGTTCAGCGTGTCCGGCGAGGGCGAGGGCGATG
CCACCTACGGCAAGCTGACCCTGAAGTTCATCTGCACCACCGGCAAGCTGCCCGTGCCCTGGCC
CACCCTCGTGACCACCCTGACCTACGGCGTGCAGTGCTTCAGCCGCTACCCCGACCACATGAAG
CAGCACGACTTCTTCAAGTCCGCCATGCCCGAAGGCTACGTCCAGGAGCGCACCATCTTCTTCA
AGGACGACGGCAACTACAAGACCCGCGCCGAGGTGAAGTTCGAGGGCGACACCCTGGTGAACCG
CATCGAGCTGAAGGGCATCGACTTCAAGGAGGACGGCAACATCCTGGGGCACAAGCTGGAGTAC
AACTACAACAGCCACAACGTCTATATCATGGCCGACAAGCAGAAGAACGGCATCAAGGTGAACT
TCAAGATCCGCCACAACATCGAGGACGGCAGCGTGCAGCTCGCCGACCACTACCAGCAGAACAC
CCCCATCGGCGACGGCCCCGTGCTGCTGCCCGACAACCACTACCTGAGCACCCAGTCCGCCCTG
AGCAAAGACCCCAACGAGAAGCGCGATCACATGGTCCTGCTGGAGTTCGTGACCGCCGCCGGGA
TCACTCTCGGCATGGACGAGCTGTACAAGTGAGCGGCCGCGTCGAGTCTAGAGGGCCCGTTTAA
ACCCGCTGATCAGCCTCGACTGTGCCTTCTAGTTGCCAGCCATCTGTTGTTTGCCCCTCCCCCG
TGCCTTCCTTGACCCTGGAAGGTGCCACTCCCACTGTCCTTTCCTAATAAAATGAGGAAATTGC
ATCGCATTGTCTGAGTAGGTGTCATTCTATTCTGGGGGGTGGGGTGGGGCAGGACAGCAAGGGG
GAGGATTGGGAAGACAATAGCAGGCATGCTGGGGATGCGGTGGGCTCTATGGATTAACACACTG
GAGAGTTCTGAAGTGGAAGAAACTACAGAGCACTTGGTTACAAAGAGCAGATTACCTCTGCGAG
CCCAGATCAACCTTTAATTCACTTGGGGGTTGGCAATTTTATTTTTAAAGAAAACTTAAAAATA
AAACCTGAAACCCCAGAACTTGAGCCTTGTGTATAGATTTTAAAAGAATATATATATCAGCCGG
GCGCGGTGGCTCATGCCTGTAATCCCAGCACTTTGGGAGGCTGAGGCGGGTGGATTGCTTGAGC
CCAGGAGTTTGAGACCAGCCTGGCCAACGTGGCAAAACCTCGTCTCTGTTAAAAATTAGCCGGG
CGTGGTGGCACACTCCTGTAATCCCAGCTACTGGGGAGGCTGAGGCACGAGAATCACTTGAACC
CAGGAAGCGGGGTTGCAGTGAGCCAAAGGTACACCACTACACTCCAGCCTGGGCAACAGAGCAA
GACTCGGTCTCAAAAACAAAATTTAAAAAAGATATAAGGC
exemplary donor template for insertion at GAPDH locus
SEQ ID NO: 48
GAAGACTGTGGATGGCCCCTCCGGGAAACTGTGGCGTGATGGCCGCGGGGCTCTCCAGAACATC
ATCCCTGCCTCTACTGGCGCTGCCAAGGCTGTGGGCAAGGTCATCCCTGAGCTGAACGGGAAGC
TCACTGGCATGGCCTTCCGTGTCCCCACTGCCAACGTGTCAGTGGTGGACCTGACCTGCCGTCT
AGAAAAACCTGCCAAATATGATGACATCAAGAAGGTGGTGAAGCAGGCGTCGGAGGGCCCCCTC
AAGGGCATCCTGGGCTACACTGAGCACCAGGTGGTCTCCTCTGACTTCAACAGCGACACCCACT
CCTCCACCTTTGACGCTGGGGCTGGCATTGCCCTCAACGACCACTTTGTCAAGCTCATTTCCTG
GTATGTGGCTGGGGCCAGAGACTGGCTCTTAAAAAGTGCAGGGTCTGGCGCCCTCTGGTGGCTG
GCTCAGAAAAAGGGCCCTGACAACTCTTTACATCTTCTAGGTATGACAACGAGTTCGGATATAG
CAATAGAGTGGTCGATCTGATGGCTCATATGGCTAGCAAAGAGGGAAGCGGAGCTACTAACTTC
AGCCTGCTGAAGCAGGCTGGAGACGTGGAGGAGAACCCTGGACCTATGTGGCCCCTGGTAGCGG
CGCTGTTGCTGGGCTCGGCGTGCTGCGGATCAGCTCAGCTACTATTTAATAAAACAAAATCTGT
AGAATTCACGTTTTGTAATGACACTGTCGTCATTCCATGCTTTGTTACTAATATGGAGGCACAA
AACACTACTGAAGTATACGTAAAGTGGAAATTTAAAGGAAGAGATATTTACACCTTTGATGGAG
CTCTAAACAAGTCCACTGTCCCCACTGACTTTAGTAGTGCAAAAATTGAAGTCTCACAATTACT
AAAAGGAGATGCCTCTTTGAAGATGGATAAGAGTGATGCTGTCTCACACACAGGAAACTACACT
TGTGAAGTAACAGAATTAACCAGAGAAGGTGAAACGATCATCGAGCTAAAATATCGTGTTGTTT
CATGGTTTTCTCCAAATGAAAATATTCTTATTGTTATTTTCCCAATTTTTGCTATACTCCTGTT
CTGGGGACAGTTTGGTATTAAAACACTTAAATATAGATCCGGTGGTATGGATGAGAAAACAATT
GCTTTACTTGTTGCTGGACTAGTGATCACTGTCATTGTCATTGTTGGAGCCATTCTTTTCGTCC
CAGGTGAATATTCATTAAAGAATGCTACTGGCCTTGGTTTAATTGTGACTTCTACAGGGATATT
AATATTACTTCACTACTATGTGTTTAGTACAGCGATTGGATTAACCTCCTTCGTCATTGCCATA
TTGGTTATTCAGGTGATAGCCTATATCCTCGCTGTGGTTGGACTGAGTCTCTGTATTGCGGCGT
GTATACCAATGCATGGCCCTCTTCTGATTTCAGGTTTGAGTATCTTAGCTCTAGCACAATTACT
TGGACTAGTTTATATGAAATTTGTGGCTTCCAATCAGAAGACTATACAACCTCCTAGGAAAGCT
GTAGAGGAACCCCTTAATGCATTCAAAGAATCAAAAGGAATGATGAATGATGAATGAGCGGCCG
CGTCGAGTCTAGAGGGCCCGTTTAAACCCGCTGATCAGCCTCGACTGTGCCTTCTAGTTGCCAG
CCATCTGTTGTTTGCCCCTCCCCCGTGCCTTCCTTGACCCTGGAAGGTGCCACTCCCACTGTCC
TTTCCTAATAAAATGAGGAAATTGCATCGCATTGTCTGAGTAGGTGTCATTCTATTCTGGGGGG
TGGGGTGGGGCAGGACAGCAAGGGGGAGGATTGGGAAGACAATAGCAGGCATGCTGGGGATGCG
GTGGGCTCTATGGATTTGGCTACAGCAACAGGGTGGTGGACCTCATGGCCCACATGGCCTCCAA
GGAGTAAGACCCCTGGACCACCAGCCCCAGCAAGAGCACAAGAGGAAGAGAGAGACCCTCACTG
CTGGGGAGTCCCTGCCACACTCAGTCCCCCACCACACTGAATCTCCCCTCCTCACAGTTGCCAT
GTAGACCCCTTGAAGAGGGGAGGGGCCTAGGGAGCCGCACCTTGTCATGTACCATCAATAAAGT
ACCCTGTGCTCAACCAGTTACTTGTCCTGTCTTATTCTAGGGTCTGGGGCAGAGGGGAGGGAAG
CTGGGCTTGTGTCAAGGTGAGACATTCTTGCTGGGGAGGGACCTGGTATGTTCTCCTCAGACTG
AGGGTAGGGCCTCCAAACAGCCTTGCTTGCTTCGAGAACCATTTGCTTCCCGCTCAGACGTCTT
GAGTGCTACAGGAAGCTGGCACCACTACTTCAGAGAACAAGGCCTTTTCCTCTCCTCGCTCCAG
T
exemplary donor template for insertion at GAPDH locus
SEQ ID NO: 205
GAAGACTGTGGATGGCCCCTCCGGGAAACTGTGGCGTGATGGCCGCGGGGCTCTCCAGAACATC
ATCCCTGCCTCTACTGGCGCTGCCAAGGCTGTGGGCAAGGTCATCCCTGAGCTGAACGGGAAGC
TCACTGGCATGGCCTTCCGTGTCCCCACTGCCAACGTGTCAGTGGTGGACCTGACCTGCCGTCT
AGAAAAACCTGCCAAATATGATGACATCAAGAAGGTGGTGAAGCAGGCGTCGGAGGGCCCCCTC
AAGGGCATCCTGGGCTACACTGAGCACCAGGTGGTCTCCTCTGACTTCAACAGCGACACCCACT
CCTCCACCTTTGACGCTGGGGCTGGCATTGCCCTCAACGACCACTTTGTCAAGCTCATTTCCTG
GTATGTGGCTGGGGCCAGAGACTGGCTCTTAAAAAGTGCAGGGTCTGGCGCCCTCTGGTGGCTG
GCTCAGAAAAAGGGCCCTGACAACTCTTTACATCTTCTAGGTATGACAACGAGTTCGGATATAG
CAATAGAGTGGTCGATCTGATGGCTCATATGGCTAGCAAAGAGGGAAGCGGAGCTACTAACTTC
AGCCTGCTGAAGCAGGCTGGAGACGTGGAGGAGAACCCTGGACCTATGTGGCAACTGCTGCTGC
CTACAGCTCTGCTGCTTCTGGTGTCTGCCGGCATGAGAACCGAGGATCTGCCTAAGGCCGTGGT
GTTCCTGGAACCTCAGTGGTACAGAGTGCTGGAAAAGGACAGCGTGACCCTGAAGTGCCAGGGC
GCCTATTCTCCCGAGGACAATAGCACCCAGTGGTTCCACAACGAGAGCCTGATCAGCAGCCAGG
CCAGCAGCTACTTTATCGATGCCGCCACCGTGGACGACAGCGGCGAGTACAGATGCCAGACCAA
TCTGAGCACCCTGAGCGACCCTGTGCAGCTGGAAGTGCACATTGGATGGTTGCTGCTGCAAGCC
CCTAGATGGGTGTTCAAAGAAGAGGACCCCATCCACCTGAGATGCCACTCTTGGAAGAACACAG
CCCTGCACAAAGTGACCTACCTGCAGAACGGCAAGGGCAGAAAGTACTTCCACCACAACAGCGA
CTTCTACATCCCCAAGGCCACACTGAAGGACTCCGGCTCCTACTTCTGCAGAGGCCTGGTCGGC
AGCAAGAACGTGTCCAGCGAGACAGTGAACATCACCATCACACAGGGCCTCGCCGTGTCTACCA
TCAGCAGCTTTTTCCCACCTGGCTATCAGGTGTCCTTCTGCCTGGTCATGGTGCTGCTGTTCGC
CGTGGATACCGGCCTGTACTTCAGCGTCAAGACCAACATCCGGTCCAGCACCAGAGACTGGAAG
GACCACAAGTTCAAGTGGCGGAAGGACCCTCAGGACAAGTAAGCGGCCGCGTCGAGTCTAGAGG
GCCCGTTTAAACCCGCTGATCAGCCTCGACTGTGCCTTCTAGTTGCCAGCCATCTGTTGTTTGC
CCCTCCCCCGTGCCTTCCTTGACCCTGGAAGGTGCCACTCCCACTGTCCTTTCCTAATAAAATG
AGGAAATTGCATCGCATTGTCTGAGTAGGTGTCATTCTATTCTGGGGGGTGGGGTGGGGCAGGA
CAGCAAGGGGGAGGATTGGGAAGACAATAGCAGGCATGCTGGGGATGCGGTGGGCTCTATGGAT
TTGGCTACAGCAACAGGGTGGTGGACCTCATGGCCCACATGGCCTCCAAGGAGTAAGACCCCTG
GACCACCAGCCCCAGCAAGAGCACAAGAGGAAGAGAGAGACCCTCACTGCTGGGGAGTCCCTGC
CACACTCAGTCCCCCACCACACTGAATCTCCCCTCCTCACAGTTGCCATGTAGACCCCTTGAAG
AGGGGAGGGGCCTAGGGAGCCGCACCTTGTCATGTACCATCAATAAAGTACCCTGTGCTCAACC
AGTTACTTGTCCTGTCTTATTCTAGGGTCTGGGGCAGAGGGGAGGGAAGCTGGGCTTGTGTCAA
GGTGAGACATTCTTGCTGGGGAGGGACCTGGTATGTTCTCCTCAGACTGAGGGTAGGGCCTCCA
AACAGCCTTGCTTGCTTCGAGAACCATTTGCTTCCCGCTCAGACGTCTTGAGTGCTACAGGAAG
CTGGCACCACTACTTCAGAGAACAAGGCCTTTTCCTCTCCTCGCTCCAGT
exemplary donor template for insertion at GAPDH locus
SEQ ID NO: 206
GTCGACGAAGACTGTGGATGGCCCCTCCGGGAAACTGTGGCGTGATGGCCGCGGGGCTCTCCAG
AACATCATCCCTGCCTCTACTGGCGCTGCCAAGGCTGTGGGCAAGGTCATCCCTGAGCTGAACG
GGAAGCTCACTGGCATGGCCTTCCGTGTCCCCACTGCCAACGTGTCAGTGGTGGACCTGACCTG
CCGTCTAGAAAAACCTGCCAAATATGATGACATCAAGAAGGTGGTGAAGCAGGCGTCGGAGGGC
CCCCTCAAGGGCATCCTGGGCTACACTGAGCACCAGGTGGTCTCCTCTGACTTCAACAGCGACA
CCCACTCCTCCACCTTTGACGCTGGGGCTGGCATTGCCCTCAACGACCACTTTGTCAAGCTCAT
TTCCTGGTATGTGGCTGGGGCCAGAGACTGGCTCTTAAAAAGTGCAGGGTCTGGCGCCCTCTGG
TGGCTGGCTCAGAAAAAGGGCCCTGACAACTCTTTACATCTTCTAGGTATGACAACGAGTTCGG
ATATAGCAATAGAGTGGTCGATCTGATGGCTCATATGGCTAGCAAAGAGGGAAGCGGAGCTACT
AACTTCAGCCTGCTGAAGCAGGCTGGAGACGTGGAGGAGAACCCTGGACCTATGCTTCTCCTGG
TGACAAGCCTTCTGCTCTGTGAGTTACCACACCCAGCATTCCTCCTGATCCCAGACATCCAGAT
GACACAGACTACATCCTCCCTGTCTGCCTCTCTGGGAGACAGAGTCACCATCAGTTGCAGGGCA
AGTCAGGACATTAGTAAATATTTAAATTGGTATCAGCAGAAACCAGATGGAACTGTTAAACTCC
TGATCTACCATACATCAAGATTACACTCAGGAGTCCCATCAAGGTTCAGTGGCAGTGGGTCTGG
AACAGATTATTCTCTCACCATTAGCAACCTGGAGCAAGAAGATATTGCCACTTACTTTTGCCAA
CAGGGTAATACGCTTCCGTACACGTTCGGAGGGGGGACTAAGTTGGAAATAACAGGCTCCACCT
CTGGATCCGGCAAGCCCGGATCTGGCGAGGGATCCACCAAGGGCGAGGTGAAACTGCAGGAGTC
AGGACCTGGCCTGGTGGCGCCCTCACAGAGCCTGTCCGTCACATGCACTGTCTCAGGGGTCTCA
TTACCCGACTATGGTGTAAGCTGGATTCGCCAGCCTCCACGAAAGGGTCTGGAGTGGCTGGGAG
TAATATGGGGTAGTGAAACCACATACTATAATTCAGCTCTCAAATCCAGACTGACCATCATCAA
GGACAACTCCAAGAGCCAAGTTTTCTTAAAAATGAACAGTCTGCAAACTGATGACACAGCCATT
TACTACTGTGCCAAACATTATTACTACGGTGGTAGCTATGCTATGGACTACTGGGGTCAAGGAA
CCTCAGTCACCGTCTCCTCAGCGGCCGCAATTGAAGTTATGTATCCTCCTCCTTACCTAGACAA
TGAGAAGAGCAATGGAACCATTATCCATGTGAAAGGGAAACACCTTTGTCCAAGTCCCCTATTT
CCCGGACCTTCTAAGCCCTTTTGGGTGCTGGTGGTGGTTGGGGGAGTCCTGGCTTGCTATAGCT
TGCTAGTAACAGTGGCCTTTATTATTTTCTGGGTGAGGAGTAAGAGGAGCAGGCTCCTGCACAG
TGACTACATGAACATGACTCCCCGCCGCCCCGGGCCCACCCGCAAGCATTACCAGCCCTATGCC
CCACCACGCGACTTCGCAGCCTATCGCTCCAGAGTGAAGTTCAGCAGGAGCGCAGACGCCCCCG
CGTACCAGCAGGGCCAGAACCAGCTCTATAACGAGCTCAATCTAGGACGAAGAGAGGAGTACGA
TGTTTTGGACAAGAGACGTGGCCGGGACCCTGAGATGGGGGGAAAGCCGAGAAGGAAGAACCCT
CAGGAAGGCCTGTACAATGAACTGCAGAAAGATAAGATGGCGGAGGCCTACAGTGAGATTGGGA
TGAAAGGCGAGCGCCGGAGGGGCAAGGGGCACGATGGCCTTTACCAGGGTCTCAGTACAGCCAC
CAAGGACACCTACGACGCCCTTCACATGCAGGCCCTGCCCCCTCGCTAAAGCGGCCGCGTCGAG
TCTAGAGGGCCCGTTTAAACCCGCTGATCAGCCTCGACTGTGCCTTCTAGTTGCCAGCCATCTG
TTGTTTGCCCCTCCCCCGTGCCTTCCTTGACCCTGGAAGGTGCCACTCCCACTGTCCTTTCCTA
ATAAAATGAGGAAATTGCATCGCATTGTCTGAGTAGGTGTCATTCTATTCTGGGGGGTGGGGTG
GGGCAGGACAGCAAGGGGGAGGATTGGGAAGACAATAGCAGGCATGCTGGGGATGCGGTGGGCT
CTATGGATTTGGCTACAGCAACAGGGTGGTGGACCTCATGGCCCACATGGCCTCCAAGGAGTAA
GACCCCTGGACCACCAGCCCCAGCAAGAGCACAAGAGGAAGAGAGAGACCCTCACTGCTGGGGA
GTCCCTGCCACACTCAGTCCCCCACCACACTGAATCTCCCCTCCTCACAGTTGCCATGTAGACC
CCTTGAAGAGGGGAGGGGCCTAGGGAGCCGCACCTTGTCATGTACCATCAATAAAGTACCCTGT
GCTCAACCAGTTACTTGTCCTGTCTTATTCTAGGGTCTGGGGCAGAGGGGAGGGAAGCTGGGCT
TGTGTCAAGGTGAGACATTCTTGCTGGGGAGGGACCTGGTATGTTCTCCTCAGACTGAGGGTAG
GGCCTCCAAACAGCCTTGCTTGCTTCGAGAACCATTTGCTTCCCGCTCAGACGTCTTGAGTGCT
ACAGGAAGCTGGCACCACTACTTCAGAGAACAAGGCCTTTTCCTCTCCTCGCTCCAGT
exemplary donor template for insertion at GAPDH locus
SEQ ID NO: 207
GTCGACGAAGACTGTGGATGGCCCCTCCGGGAAACTGTGGCGTGATGGCCGCGGGGCTCTCCAG
AACATCATCCCTGCCTCTACTGGCGCTGCCAAGGCTGTGGGCAAGGTCATCCCTGAGCTGAACG
GGAAGCTCACTGGCATGGCCTTCCGTGTCCCCACTGCCAACGTGTCAGTGGTGGACCTGACCTG
CCGTCTAGAAAAACCTGCCAAATATGATGACATCAAGAAGGTGGTGAAGCAGGCGTCGGAGGGC
CCCCTCAAGGGCATCCTGGGCTACACTGAGCACCAGGTGGTCTCCTCTGACTTCAACAGCGACA
CCCACTCCTCCACCTTTGACGCTGGGGCTGGCATTGCCCTCAACGACCACTTTGTCAAGCTCAT
TTCCTGGTATGTGGCTGGGGCCAGAGACTGGCTCTTAAAAAGTGCAGGGTCTGGCGCCCTCTGG
TGGCTGGCTCAGAAAAAGGGCCCTGACAACTCTTTACATCTTCTAGGTATGACAACGAGTTCGG
ATATAGCAATAGAGTGGTCGATCTGATGGCTCATATGGCTAGCAAAGAGGGAAGCGGAGCTACT
AACTTCAGCCTGCTGAAGCAGGCTGGAGACGTGGAGGAGAACCCTGGACCTATGGCACTCCCCG
TCACCGCCCTTCTCTTGCCCCTCGCCCTGCTGCTGCATGCTGCCAGGCCCATGGACGAAGTGCA
GCTCGTGGAGTCCGGTGGAGGACTCGTCCAACCGGGCGGATCCCTTCGCTTGTCCTGCGCCGCA
TCAGGCTTCAGCTTCACCAACTATGGCGTCCACTGGGTCAGACAGGCCCCCGGAAAGGGACTGG
AATGGGTGTCCGTGATCTGGAGCGGCGGGAACACCGACTACAACACCTCCGTGAAGGGCCGGTT
CACTATTAGCCGCGACAACTCCAAGAACACTCTGTACCTCCAAATGAACTCCCTGAGGGCCGAA
GATACTGCTGTGTACTATTGCGCGAGAGCCCTGACCTACTACGACTACGAGTTCGCGTACTGGG
GCCAGGGGACTCTCGTGACCGTGTCCAGCGGTGGTGGAGGTTCCGGAGGCGGAGGTTCTGGTGG
CGGGGGATCAGAAATCGTGCTGACTCAGTCCCCTGCGACCTTGTCCCTGAGCCCTGGAGAACGG
GCCACCCTGAGCTGTAGAGCCAGCCAGAGCATCGGGACAAATATTCACTGGTACCAGCAGAAAC
CCGGACAAGCACCACGGCTGCTGATCTACTACGCCTCCGAGTCGATTTCCGGAATCCCGGCTCG
CTTTTCGGGGTCTGGATCGGGAACGGACTTCACTCTGACCATCTCGTCGCTGGAACCCGAGGAT
TTCGCCGTGTACTACTGCCAACAGAACAACAATTGGCCGACCACGTTCGGCCAGGGCACCAAGC
TCGAGATTAAGGGATCACTGGAAGCGGCCGCAACCACAACACCTGCTCCAAGGCCCCCCACACC
CGCTCCAACTATAGCCAGCCAACCATTGAGCCTCAGACCTGAAGCTTGCAGGCCCGCAGCAGGA
GGCGCCGTCCATACGCGAGGCCTGGACTTCGCGTGTGATATTTATATTTGGGCCCCTTTGGCCG
GAACATGTGGGGTGTTGCTTCTCTCCCTTGTGATCACTCTGTATTGTAAGCGCGGGAGAAAGAA
GCTCCTGTACATCTTCAAGCAGCCTTTTATGCGACCTGTGCAAACCACTCAGGAAGAAGATGGG
TGTTCATGCCGCTTCCCCGAGGAGGAAGAAGGAGGGTGTGAACTGAGGGTGAAATTTTCTAGAA
GCGCCGATGCTCCCGCATATCAGCAGGGTCAGAATCAGCTCTACAATGAATTGAATCTCGGCAG
GCGAGAAGAGTACGATGTTCTGGACAAGAGACGGGGCAGGGATCCCGAGATGGGGGGAAAGCCC
CGGAGAAAAAATCCTCAGGAGGGGTTGTACAATGAGCTGCAGAAGGACAAGATGGCTGAAGCCT
ATAGCGAGATCGGAATGAAAGGCGAAAGACGCAGAGGCAAGGGGCATGACGGTCTGTACCAGGG
TCTCTCTACAGCCACCAAGGACACTTATGATGCGTTGCATATGCAAGCCTTGCCACCCCGCTAA
AGCGGCCGCGTCGAGTCTAGAGGGCCCGTTTAAACCCGCTGATCAGCCTCGACTGTGCCTTCTA
GTTGCCAGCCATCTGTTGTTTGCCCCTCCCCCGTGCCTTCCTTGACCCTGGAAGGTGCCACTCC
CACTGTCCTTTCCTAATAAAATGAGGAAATTGCATCGCATTGTCTGAGTAGGTGTCATTCTATT
CTGGGGGGTGGGGTGGGGCAGGACAGCAAGGGGGAGGATTGGGAAGACAATAGCAGGCATGCTG
GGGATGCGGTGGGCTCTATGGATTTGGCTACAGCAACAGGGTGGTGGACCTCATGGCCCACATG
GCCTCCAAGGAGTAAGACCCCTGGACCACCAGCCCCAGCAAGAGCACAAGAGGAAGAGAGAGAC
CCTCACTGCTGGGGAGTCCCTGCCACACTCAGTCCCCCACCACACTGAATCTCCCCTCCTCACA
GTTGCCATGTAGACCCCTTGAAGAGGGGAGGGGCCTAGGGAGCCGCACCTTGTCATGTACCATC
AATAAAGTACCCTGTGCTCAACCAGTTACTTGTCCTGTCTTATTCTAGGGTCTGGGGCAGAGGG
GAGGGAAGCTGGGCTTGTGTCAAGGTGAGACATTCTTGCTGGGGAGGGACCTGGTATGTTCTCC
TCAGACTGAGGGTAGGGCCTCCAAACAGCCTTGCTTGCTTCGAGAACCATTTGCTTCCCGCTCA
GACGTCTTGAGTGCTACAGGAAGCTGGCACCACTACTTCAGAGAACAAGGCCTTTTCCTCTCCT
CGCTCCAGT
exemplary donor template for insertion at GAPDH locus
SEQ ID NO: 208
GAAGACTGTGGATGGCCCCTCCGGGAAACTGTGGCGTGATGGCCGCGGGGCTCTCCAGAACATC
ATCCCTGCCTCTACTGGCGCTGCCAAGGCTGTGGGCAAGGTCATCCCTGAGCTGAACGGGAAGC
TCACTGGCATGGCCTTCCGTGTCCCCACTGCCAACGTGTCAGTGGTGGACCTGACCTGCCGTCT
AGAAAAACCTGCCAAATATGATGACATCAAGAAGGTGGTGAAGCAGGCGTCGGAGGGCCCCCTC
AAGGGCATCCTGGGCTACACTGAGCACCAGGTGGTCTCCTCTGACTTCAACAGCGACACCCACT
CCTCCACCTTTGACGCTGGGGCTGGCATTGCCCTCAACGACCACTTTGTCAAGCTCATTTCCTG
GTATGTGGCTGGGGCCAGAGACTGGCTCTTAAAAAGTGCAGGGTCTGGCGCCCTCTGGTGGCTG
GCTCAGAAAAAGGGCCCTGACAACTCTTTACATCTTCTAGGTATGACAACGAGTTCGGATATAG
CAATAGAGTGGTCGATCTGATGGCTCATATGGCTAGCAAAGAGGGAAGCGGAGCTACTAACTTC
AGCCTGCTGAAGCAGGCTGGAGACGTGGAGGAGAACCCTGGACCTATGGATTGGACCTGGATCC
TGTTTCTGGTGGCCGCTGCCACAAGAGTGCACAGCAATTGGGTCAACGTGATCAGCGACCTGAA
GAAGATCGAGGACCTGATCCAGAGCATGCACATCGACGCCACACTGTACACCGAGTCCGATGTG
CACCCTAGCTGCAAAGTGACCGCCATGAAGTGCTTTCTGCTGGAACTGCAAGTGATCAGCCTGG
AAAGCGGCGACGCCAGCATCCACGATACCGTGGAAAACCTGATCATCCTGGCCAACAACAGCCT
GAGCAGCAACGGCAATGTGACCGAGAGCGGCTGCAAAGAGTGCGAGGAACTGGAAGAGAAGAAC
ATCAAAGAGTTCCTCCAGAGCTTCGTCCACATCGTGCAGATGTTCATCAACACCAGCGGAAGCG
GAGCCACAAACTTCTCTCTGCTGAAGCAGGCAGGAGATGTTGAAGAAAACCCTGGACCTATCAC
CTGTCCTCCACCTATGAGCGTGGAACACGCCGACATCTGGGTCAAGAGCTACAGCCTGTACAGC
AGAGAGCGGTACATCTGCAACAGCGGCTTCAAGAGAAAGGCCGGCACAAGCAGCCTGACCGAGT
GTGTGCTGAACAAGGCCACAAACGTGGCCCACTGGACCACACCTAGCCTGAAGTGCATCAGAGA
TCCCGCTCTGGTTCATCAGAGGCCTGCCCCTCCATCTACAGTGACAACAGCTGGCGTGACCCCT
CAGCCTGAGTCTCTGTCTCCATCTGGAAAAGAGCCTGCCGCCAGCTCTCCCAGCTCTAACAATA
CTGCTGCCACCACAGCCGCTATCGTGCCTGGATCTCAGCTGATGCCTAGCAAGAGCCCTAGCAC
CGGCACAACAGAGATCAGCTCTCACGAGAGCAGCCACGGAACACCTTCTCAGACCACCGCCAAG
AATTGGGAGCTGACAGCCTCTGCCTCTCATCAGCCACCTGGCGTGTACCCACAGGGCCACTCTG
ATACAACAGTGGCCATCAGCACCAGCACCGTTCTGCTGTGTGGCCTGTCTGCTGTTAGCCTGCT
GGCCTGCTACCTGAAGTCTAGACAGACACCTCCTCTGGCCAGCGTGGAAATGGAAGCCATGGAA
GCTCTGCCTGTCACATGGGGCACCAGCAGCAGAGATGAGGACCTCGAGAATTGCAGCCACCACC
TGGGAAGCGGAGCCACAAACTTCTCTCTGCTGAAGCAGGCAGGAGATGTTGAAGAAAACCCTGG
ACCTATGGTGAGCAAGGGCGAGGAGCTGTTCACCGGGGTGGTGCCCATCCTGGTCGAGCTGGAC
GGCGACGTAAACGGCCACAAGTTCAGCGTGTCCGGCGAGGGCGAGGGCGATGCCACCTACGGCA
AGCTGACCCTGAAGTTCATCTGCACCACCGGCAAGCTGCCCGTGCCCTGGCCCACCCTCGTGAC
CACCCTGACCTACGGCGTGCAGTGCTTCAGCCGCTACCCCGACCACATGAAGCAGCACGACTTC
TTCAAGTCCGCCATGCCCGAAGGCTACGTCCAGGAGCGCACCATCTTCTTCAAGGACGACGGCA
ACTACAAGACCCGCGCCGAGGTGAAGTTCGAGGGCGACACCCTGGTGAACCGCATCGAGCTGAA
GGGCATCGACTTCAAGGAGGACGGCAACATCCTGGGGCACAAGCTGGAGTACAACTACAACAGC
CACAACGTCTATATCATGGCCGACAAGCAGAAGAACGGCATCAAGGTGAACTTCAAGATCCGCC
ACAACATCGAGGACGGCAGCGTGCAGCTCGCCGACCACTACCAGCAGAACACCCCCATCGGCGA
CGGCCCCGTGCTGCTGCCCGACAACCACTACCTGAGCACCCAGTCCGCCCTGAGCAAAGACCCC
AACGAGAAGCGCGATCACATGGTCCTGCTGGAGTTCGTGACCGCCGCCGGGATCACTCTCGGCA
TGGACGAGCTGTACAAGTAAGCGGCCGCGTCGAGTCTAGAGGGCCCGTTTAAACCCGCTGATCA
GCCTCGACTGTGCCTTCTAGTTGCCAGCCATCTGTTGTTTGCCCCTCCCCCGTGCCTTCCTTGA
CCCTGGAAGGTGCCACTCCCACTGTCCTTTCCTAATAAAATGAGGAAATTGCATCGCATTGTCT
GAGTAGGTGTCATTCTATTCTGGGGGGTGGGGTGGGGCAGGACAGCAAGGGGGAGGATTGGGAA
GACAATAGCAGGCATGCTGGGGATGCGGTGGGCTCTATGGATTTGGCTACAGCAACAGGGTGGT
GGACCTCATGGCCCACATGGCCTCCAAGGAGTAAGACCCCTGGACCACCAGCCCCAGCAAGAGC
ACAAGAGGAAGAGAGAGACCCTCACTGCTGGGGAGTCCCTGCCACACTCAGTCCCCCACCACAC
TGAATCTCCCCTCCTCACAGTTGCCATGTAGACCCCTTGAAGAGGGGAGGGGCCTAGGGAGCCG
CACCTTGTCATGTACCATCAATAAAGTACCCTGTGCTCAACCAGTTACTTGTCCTGTCTTATTC
TAGGGTCTGGGGCAGAGGGGAGGGAAGCTGGGCTTGTGTCAAGGTGAGACATTCTTGCTGGGGA
GGGACCTGGTATGTTCTCCTCAGACTGAGGGTAGGGCCTCCAAACAGCCTTGCTTGCTTCGAGA
ACCATTTGCTTCCCGCTCAGACGTCTTGAGTGCTACAGGAAGCTGGCACCACTACTTCAGAGAA
CAAGGCCTTTTCCTCTCCTCGCTCCAGT
exemplary donor template for insertion at GAPDH locus
SEQ ID NO: 209
GAAGACTGTGGATGGCCCCTCCGGGAAACTGTGGCGTGATGGCCGCGGGGCTCTCCAGAACATC
ATCCCTGCCTCTACTGGCGCTGCCAAGGCTGTGGGCAAGGTCATCCCTGAGCTGAACGGGAAGC
TCACTGGCATGGCCTTCCGTGTCCCCACTGCCAACGTGTCAGTGGTGGACCTGACCTGCCGTCT
AGAAAAACCTGCCAAATATGATGACATCAAGAAGGTGGTGAAGCAGGCGTCGGAGGGCCCCCTC
AAGGGCATCCTGGGCTACACTGAGCACCAGGTGGTCTCCTCTGACTTCAACAGCGACACCCACT
CCTCCACCTTTGACGCTGGGGCTGGCATTGCCCTCAACGACCACTTTGTCAAGCTCATTTCCTG
GTATGTGGCTGGGGCCAGAGACTGGCTCTTAAAAAGTGCAGGGTCTGGCGCCCTCTGGTGGCTG
GCTCAGAAAAAGGGCCCTGACAACTCTTTACATCTTCTAGGTATGACAACGAGTTCGGATATAG
CAATAGAGTGGTCGATCTGATGGCTCATATGGCTAGCAAAGAGGGAAGCGGAGCTACTAACTTC
AGCCTGCTGAAGCAGGCTGGAGACGTGGAGGAGAACCCTGGACCTATGTGGCAGCTGTTGCTGC
CGACAGCCCTCCTGTTGCTGGTCTCCGCTGGCATGAGAACCGAGGATCTGCCTAAGGCCGTGGT
GTTCCTGGAACCTCAGTGGTACAGAGTGCTGGAAAAGGACAGCGTGACCCTGAAGTGCCAGGGC
GCCTATTCTCCCGAGGACAATAGCACCCAGTGGTTCCACAACGAGAGCCTGATCAGCAGCCAGG
CCAGCAGCTACTTTATCGATGCCGCCACCGTGGACGACAGCGGCGAGTACAGATGCCAGACCAA
TCTGAGCACCCTGAGCGACCCTGTGCAGCTGGAAGTGCACATTGGATGGTTGCTGCTGCAAGCC
CCTAGATGGGTGTTCAAAGAAGAGGACCCCATCCACCTGAGATGCCACTCTTGGAAGAACACAG
CCCTGCACAAAGTGACCTACCTGCAGAACGGCAAGGGCAGAAAGTACTTCCACCACAACAGCGA
CTTCTACATCCCCAAGGCCACACTGAAGGACTCCGGCTCCTACTTCTGCAGAGGCCTGGTCGGC
AGCAAGAACGTGTCCAGCGAGACAGTGAACATCACCATCACACAGGGCCTCGCCGTGTCTACCA
TCAGCAGCTTTTTCCCACCTGGCTATCAGGTGTCCTTCTGCCTGGTCATGGTGCTGCTGTTCGC
CGTGGATACCGGCCTGTACTTCAGCGTCAAGACCAACATCCGGTCCAGCACCAGAGACTGGAAG
GACCACAAGTTCAAGTGGCGGAAGGACCCTCAGGACAAGGGAAGCGGAGCCACAAACTTCTCTC
TGCTGAAGCAGGCAGGAGATGTTGAAGAAAACCCTGGACCTATGGATTGGACCTGGATCCTGTT
TCTGGTGGCCGCTGCCACAAGAGTGCACAGCAATTGGGTCAACGTGATCAGCGACCTGAAGAAG
ATCGAGGACCTGATCCAGAGCATGCACATCGACGCCACACTGTACACCGAGTCCGATGTGCACC
CTAGCTGCAAAGTGACCGCCATGAAGTGCTTTCTGCTGGAACTGCAAGTGATCAGCCTGGAAAG
CGGCGACGCCAGCATCCACGATACCGTGGAAAACCTGATCATCCTGGCCAACAACAGCCTGAGC
AGCAACGGCAATGTGACCGAGAGCGGCTGCAAAGAGTGCGAGGAACTGGAAGAGAAGAACATCA
AAGAGTTCCTCCAGAGCTTCGTCCACATCGTGCAGATGTTCATCAACACCAGCGGAAGCGGAGC
CACAAACTTCTCTCTGCTGAAGCAGGCAGGAGATGTTGAAGAAAACCCTGGACCTATCACCTGT
CCTCCACCTATGAGCGTGGAACACGCCGACATCTGGGTCAAGAGCTACAGCCTGTACAGCAGAG
AGCGGTACATCTGCAACAGCGGCTTCAAGAGAAAGGCCGGCACAAGCAGCCTGACCGAGTGTGT
GCTGAACAAGGCCACAAACGTGGCCCACTGGACCACACCTAGCCTGAAGTGCATCAGAGATCCC
GCTCTGGTTCATCAGAGGCCTGCCCCTCCATCTACAGTGACAACAGCTGGCGTGACCCCTCAGC
CTGAGTCTCTGTCTCCATCTGGAAAAGAGCCTGCCGCCAGCTCTCCCAGCTCTAACAATACTGC
TGCCACCACAGCCGCTATCGTGCCTGGATCTCAGCTGATGCCTAGCAAGAGCCCTAGCACCGGC
ACAACAGAGATCAGCTCTCACGAGAGCAGCCACGGAACACCTTCTCAGACCACCGCCAAGAATT
GGGAGCTGACAGCCTCTGCCTCTCATCAGCCACCTGGCGTGTACCCACAGGGCCACTCTGATAC
AACAGTGGCCATCAGCACCAGCACCGTTCTGCTGTGTGGCCTGTCTGCTGTTAGCCTGCTGGCC
TGCTACCTGAAGTCTAGACAGACACCTCCTCTGGCCAGCGTGGAAATGGAAGCCATGGAAGCTC
TGCCTGTCACATGGGGCACCAGCAGCAGAGATGAGGACCTCGAGAATTGCAGCCACCACCTGTA
AGCGGCCGCGTCGAGTCTAGAGGGCCCGTTTAAACCCGCTGATCAGCCTCGACTGTGCCTTCTA
GTTGCCAGCCATCTGTTGTTTGCCCCTCCCCCGTGCCTTCCTTGACCCTGGAAGGTGCCACTCC
CACTGTCCTTTCCTAATAAAATGAGGAAATTGCATCGCATTGTCTGAGTAGGTGTCATTCTATT
CTGGGGGGTGGGGTGGGGCAGGACAGCAAGGGGGAGGATTGGGAAGACAATAGCAGGCATGCTG
GGGATGCGGTGGGCTCTATGGATTTGGCTACAGCAACAGGGTGGTGGACCTCATGGCCCACATG
GCCTCCAAGGAGTAAGACCCCTGGACCACCAGCCCCAGCAAGAGCACAAGAGGAAGAGAGAGAC
CCTCACTGCTGGGGAGTCCCTGCCACACTCAGTCCCCCACCACACTGAATCTCCCCTCCTCACA
GTTGCCATGTAGACCCCTTGAAGAGGGGAGGGGCCTAGGGAGCCGCACCTTGTCATGTACCATC
AATAAAGTACCCTGTGCTCAACCAGTTACTTGTCCTGTCTTATTCTAGGGTCTGGGGCAGAGGG
GAGGGAAGCTGGGCTTGTGTCAAGGTGAGACATTCTTGCTGGGGAGGGACCTGGTATGTTCTCC
TCAGACTGAGGGTAGGGCCTCCAAACAGCCTTGCTTGCTTCGAGAACCATTTGCTTCCCGCTCA
GACGTCTTGAGTGCTACAGGAAGCTGGCACCACTACTTCAGAGAACAAGGCCTTTTCCTCTCCT
CGCTCCAGT
exemplary donor template for insertion at GAPDH locus
SEQ ID NO: 210
GAAGACTGTGGATGGCCCCTCCGGGAAACTGTGGCGTGATGGCCGCGGGGCTCTCCAGAACATC
ATCCCTGCCTCTACTGGCGCTGCCAAGGCTGTGGGCAAGGTCATCCCTGAGCTGAACGGGAAGC
TCACTGGCATGGCCTTCCGTGTCCCCACTGCCAACGTGTCAGTGGTGGACCTGACCTGCCGTCT
AGAAAAACCTGCCAAATATGATGACATCAAGAAGGTGGTGAAGCAGGCGTCGGAGGGCCCCCTC
AAGGGCATCCTGGGCTACACTGAGCACCAGGTGGTCTCCTCTGACTTCAACAGCGACACCCACT
CCTCCACCTTTGACGCTGGGGCTGGCATTGCCCTCAACGACCACTTTGTCAAGCTCATTTCCTG
GTATGTGGCTGGGGCCAGAGACTGGCTCTTAAAAAGTGCAGGGTCTGGCGCCCTCTGGTGGCTG
GCTCAGAAAAAGGGCCCTGACAACTCTTTACATCTTCTAGGTATGACAACGAGTTCGGATATAG
CAATAGAGTGGTCGATCTGATGGCTCATATGGCTAGCAAAGAGGGAAGCGGAGCTACTAACTTC
AGCCTGCTGAAGCAGGCTGGAGACGTGGAGGAGAACCCTGGACCTATGGATTGGACCTGGATCC
TGTTTCTGGTGGCCGCTGCCACAAGAGTGCACAGCAATTGGGTCAACGTGATCAGCGACCTGAA
GAAGATCGAGGACCTGATCCAGAGCATGCACATCGACGCCACACTGTACACCGAGTCCGATGTG
CACCCTAGCTGCAAAGTGACCGCCATGAAGTGCTTTCTGCTGGAACTGCAAGTGATCAGCCTGG
AAAGCGGCGACGCCAGCATCCACGATACCGTGGAAAACCTGATCATCCTGGCCAACAACAGCCT
GAGCAGCAACGGCAATGTGACCGAGAGCGGCTGCAAAGAGTGCGAGGAACTGGAAGAGAAGAAC
ATCAAAGAGTTCCTCCAGAGCTTCGTCCACATCGTGCAGATGTTCATCAACACCAGCTCTGGCG
GAGGAAGCGGAGGCGGAGGATCTGGTGGTGGTGGATCTGGCGGCGGTGGTAGTGGCGGAGGTTC
TCTGCAAATCACCTGTCCTCCACCTATGAGCGTGGAACACGCCGACATCTGGGTCAAGAGCTAC
AGCCTGTACAGCAGAGAGCGGTACATCTGCAACAGCGGCTTCAAGAGAAAGGCCGGCACAAGCA
GCCTGACCGAGTGTGTGCTGAACAAGGCCACAAACGTGGCCCACTGGACCACACCTAGCCTGAA
GTGCATCAGAGATCCCGCTCTGGTTCATCAGAGGCCTGCCCCTCCATCTACAGTGACAACAGCT
GGCGTGACCCCTCAGCCTGAGTCTCTGTCTCCATCTGGAAAAGAGCCTGCCGCCAGCTCTCCCA
GCTCTAACAATACTGCTGCCACCACAGCCGCTATCGTGCCTGGATCTCAGCTGATGCCTAGCAA
GAGCCCTAGCACCGGCACAACAGAGATCAGCTCTCACGAGAGCAGCCACGGAACACCTTCTCAG
ACCACCGCCAAGAATTGGGAGCTGACAGCCTCTGCCTCTCATCAGCCACCTGGCGTGTACCCAC
AGGGCCACTCTGATACAACAGTGGCCATCAGCACCAGCACCGTTCTGCTGTGTGGCCTGTCTGC
TGTTAGCCTGCTGGCCTGCTACCTGAAGTCTAGACAGACACCTCCTCTGGCCAGCGTGGAAATG
GAAGCCATGGAAGCTCTGCCTGTCACATGGGGCACCAGCAGCAGAGATGAGGACCTCGAGAATT
GCAGCCACCACCTGGGAAGCGGAGCCACAAACTTCTCTCTGCTGAAGCAGGCAGGAGATGTTGA
AGAAAACCCTGGACCTATGTGGCAGCTGTTGCTGCCGACAGCCCTCCTGTTGCTGGTCTCCGCT
GGCATGAGAACCGAGGATCTGCCTAAGGCCGTGGTGTTCCTGGAACCTCAGTGGTACAGAGTGC
TGGAAAAGGACAGCGTGACCCTGAAGTGCCAGGGCGCCTATTCTCCCGAGGACAATAGCACCCA
GTGGTTCCACAACGAGAGCCTGATCAGCAGCCAGGCCAGCAGCTACTTTATCGATGCCGCCACC
GTGGACGACAGCGGCGAGTACAGATGCCAGACCAATCTGAGCACCCTGAGCGACCCTGTGCAGC
TGGAAGTGCACATTGGATGGTTGCTGCTGCAAGCCCCTAGATGGGTGTTCAAAGAAGAGGACCC
CATCCACCTGAGATGCCACTCTTGGAAGAACACAGCCCTGCACAAAGTGACCTACCTGCAGAAC
GGCAAGGGCAGAAAGTACTTCCACCACAACAGCGACTTCTACATCCCCAAGGCCACACTGAAGG
ACTCCGGCTCCTACTTCTGCAGAGGCCTGGTCGGCAGCAAGAACGTGTCCAGCGAGACAGTGAA
CATCACCATCACACAGGGCCTCGCCGTGTCTACCATCAGCAGCTTTTTCCCACCTGGCTATCAG
GTGTCCTTCTGCCTGGTCATGGTGCTGCTGTTCGCCGTGGATACCGGCCTGTACTTCAGCGTCA
AGACCAACATCCGGTCCAGCACCAGAGACTGGAAGGACCACAAGTTCAAGTGGCGGAAGGACCC
TCAGGACAAGTAAGCGGCCGCGTCGAGTCTAGAGGGCCCGTTTAAACCCGCTGATCAGCCTCGA
CTGTGCCTTCTAGTTGCCAGCCATCTGTTGTTTGCCCCTCCCCCGTGCCTTCCTTGACCCTGGA
AGGTGCCACTCCCACTGTCCTTTCCTAATAAAATGAGGAAATTGCATCGCATTGTCTGAGTAGG
TGTCATTCTATTCTGGGGGGTGGGGTGGGGCAGGACAGCAAGGGGGAGGATTGGGAAGACAATA
GCAGGCATGCTGGGGATGCGGTGGGCTCTATGGATTTGGCTACAGCAACAGGGTGGTGGACCTC
ATGGCCCACATGGCCTCCAAGGAGTAAGACCCCTGGACCACCAGCCCCAGCAAGAGCACAAGAG
GAAGAGAGAGACCCTCACTGCTGGGGAGTCCCTGCCACACTCAGTCCCCCACCACACTGAATCT
CCCCTCCTCACAGTTGCCATGTAGACCCCTTGAAGAGGGGAGGGGCCTAGGGAGCCGCACCTTG
TCATGTACCATCAATAAAGTACCCTGTGCTCAACCAGTTACTTGTCCTGTCTTATTCTAGGGTC
TGGGGCAGAGGGGAGGGAAGCTGGGCTTGTGTCAAGGTGAGACATTCTTGCTGGGGAGGGACCT
GGTATGTTCTCCTCAGACTGAGGGTAGGGCCTCCAAACAGCCTTGCTTGCTTCGAGAACCATTT
GCTTCCCGCTCAGACGTCTTGAGTGCTACAGGAAGCTGGCACCACTACTTCAGAGAACAAGGCC
TTTTCCTCTCCTCGCTCCAGT
exemplary donor template for insertion at GAPDH locus
SEQ ID NO: 211
GAAGACTGTGGATGGCCCCTCCGGGAAACTGTGGCGTGATGGCCGCGGGGCTCTCCAGAACATC
ATCCCTGCCTCTACTGGCGCTGCCAAGGCTGTGGGCAAGGTCATCCCTGAGCTGAACGGGAAGC
TCACTGGCATGGCCTTCCGTGTCCCCACTGCCAACGTGTCAGTGGTGGACCTGACCTGCCGTCT
AGAAAAACCTGCCAAATATGATGACATCAAGAAGGTGGTGAAGCAGGCGTCGGAGGGCCCCCTC
AAGGGCATCCTGGGCTACACTGAGCACCAGGTGGTCTCCTCTGACTTCAACAGCGACACCCACT
CCTCCACCTTTGACGCTGGGGCTGGCATTGCCCTCAACGACCACTTTGTCAAGCTCATTTCCTG
GTATGTGGCTGGGGCCAGAGACTGGCTCTTAAAAAGTGCAGGGTCTGGCGCCCTCTGGTGGCTG
GCTCAGAAAAAGGGCCCTGACAACTCTTTACATCTTCTAGGTATGACAACGAGTTCGGATATAG
CAATAGAGTGGTCGATCTGATGGCTCATATGGCTAGCAAAGAGGGAAGCGGAGCTACTAACTTC
AGCCTGCTGAAGCAGGCTGGAGACGTGGAGGAGAACCCTGGACCTATGGATTGGACCTGGATCC
TGTTTCTGGTGGCCGCTGCCACAAGAGTGCACAGCAATTGGGTCAACGTGATCAGCGACCTGAA
GAAGATCGAGGACCTGATCCAGAGCATGCACATCGACGCCACACTGTACACCGAGTCCGATGTG
CACCCTAGCTGCAAAGTGACCGCCATGAAGTGCTTTCTGCTGGAACTGCAAGTGATCAGCCTGG
AAAGCGGCGACGCCAGCATCCACGATACCGTGGAAAACCTGATCATCCTGGCCAACAACAGCCT
GAGCAGCAACGGCAATGTGACCGAGAGCGGCTGCAAAGAGTGCGAGGAACTGGAAGAGAAGAAC
ATCAAAGAGTTCCTCCAGAGCTTCGTCCACATCGTGCAGATGTTCATCAACACCAGCGGAAGCG
GAGCCACAAACTTCTCTCTGCTGAAGCAGGCAGGAGATGTTGAAGAAAACCCTGGACCTATCAC
CTGTCCTCCACCTATGAGCGTGGAACACGCCGACATCTGGGTCAAGAGCTACAGCCTGTACAGC
AGAGAGCGGTACATCTGCAACAGCGGCTTCAAGAGAAAGGCCGGCACAAGCAGCCTGACCGAGT
GTGTGCTGAACAAGGCCACAAACGTGGCCCACTGGACCACACCTAGCCTGAAGTGCATCAGAGA
TCCCGCTCTGGTTCATCAGAGGCCTGCCCCTCCATCTACAGTGACAACAGCTGGCGTGACCCCT
CAGCCTGAGTCTCTGTCTCCATCTGGAAAAGAGCCTGCCGCCAGCTCTCCCAGCTCTAACAATA
CTGCTGCCACCACAGCCGCTATCGTGCCTGGATCTCAGCTGATGCCTAGCAAGAGCCCTAGCAC
CGGCACAACAGAGATCAGCTCTCACGAGAGCAGCCACGGAACACCTTCTCAGACCACCGCCAAG
AATTGGGAGCTGACAGCCTCTGCCTCTCATCAGCCACCTGGCGTGTACCCACAGGGCCACTCTG
ATACAACAGTGGCCATCAGCACCAGCACCGTTCTGCTGTGTGGCCTGTCTGCTGTTAGCCTGCT
GGCCTGCTACCTGAAGTCTAGACAGACACCTCCTCTGGCCAGCGTGGAAATGGAAGCCATGGAA
GCTCTGCCTGTCACATGGGGCACCAGCAGCAGAGATGAGGACCTCGAGAATTGCAGCCACCACC
TGGGAAGCGGAGCCACAAACTTCTCTCTGCTGAAGCAGGCAGGAGATGTTGAAGAAAACCCTGG
ACCTATGTGGCAGCTGTTGCTGCCGACAGCCCTCCTGTTGCTGGTCTCCGCTGGCATGAGAACC
GAGGATCTGCCTAAGGCCGTGGTGTTCCTGGAACCTCAGTGGTACAGAGTGCTGGAAAAGGACA
GCGTGACCCTGAAGTGCCAGGGCGCCTATTCTCCCGAGGACAATAGCACCCAGTGGTTCCACAA
CGAGAGCCTGATCAGCAGCCAGGCCAGCAGCTACTTTATCGATGCCGCCACCGTGGACGACAGC
GGCGAGTACAGATGCCAGACCAATCTGAGCACCCTGAGCGACCCTGTGCAGCTGGAAGTGCACA
TTGGATGGTTGCTGCTGCAAGCCCCTAGATGGGTGTTCAAAGAAGAGGACCCCATCCACCTGAG
ATGCCACTCTTGGAAGAACACAGCCCTGCACAAAGTGACCTACCTGCAGAACGGCAAGGGCAGA
AAGTACTTCCACCACAACAGCGACTTCTACATCCCCAAGGCCACACTGAAGGACTCCGGCTCCT
ACTTCTGCAGAGGCCTGGTCGGCAGCAAGAACGTGTCCAGCGAGACAGTGAACATCACCATCAC
ACAGGGCCTCGCCGTGTCTACCATCAGCAGCTTTTTCCCACCTGGCTATCAGGTGTCCTTCTGC
CTGGTCATGGTGCTGCTGTTCGCCGTGGATACCGGCCTGTACTTCAGCGTCAAGACCAACATCC
GGTCCAGCACCAGAGACTGGAAGGACCACAAGTTCAAGTGGCGGAAGGACCCTCAGGACAAGTA
AGCGGCCGCGTCGAGTCTAGAGGGCCCGTTTAAACCCGCTGATCAGCCTCGACTGTGCCTTCTA
GTTGCCAGCCATCTGTTGTTTGCCCCTCCCCCGTGCCTTCCTTGACCCTGGAAGGTGCCACTCC
CACTGTCCTTTCCTAATAAAATGAGGAAATTGCATCGCATTGTCTGAGTAGGTGTCATTCTATT
CTGGGGGGTGGGGTGGGGCAGGACAGCAAGGGGGAGGATTGGGAAGACAATAGCAGGCATGCTG
GGGATGCGGTGGGCTCTATGGATTTGGCTACAGCAACAGGGTGGTGGACCTCATGGCCCACATG
GCCTCCAAGGAGTAAGACCCCTGGACCACCAGCCCCAGCAAGAGCACAAGAGGAAGAGAGAGAC
CCTCACTGCTGGGGAGTCCCTGCCACACTCAGTCCCCCACCACACTGAATCTCCCCTCCTCACA
GTTGCCATGTAGACCCCTTGAAGAGGGGAGGGGCCTAGGGAGCCGCACCTTGTCATGTACCATC
AATAAAGTACCCTGTGCTCAACCAGTTACTTGTCCTGTCTTATTCTAGGGTCTGGGGCAGAGGG
GAGGGAAGCTGGGCTTGTGTCAAGGTGAGACATTCTTGCTGGGGAGGGACCTGGTATGTTCTCC
TCAGACTGAGGGTAGGGCCTCCAAACAGCCTTGCTTGCTTCGAGAACCATTTGCTTCCCGCTCA
GACGTCTTGAGTGCTACAGGAAGCTGGCACCACTACTTCAGAGAACAAGGCCTTTTCCTCTCCT
CGCTCCAGT
exemplary donor template for insertion at GAPDH locus
SEQ ID NO: 212
GAAGACTGTGGATGGCCCCTCCGGGAAACTGTGGCGTGATGGCCGCGGGGCTCTCCAGAACATC
ATCCCTGCCTCTACTGGCGCTGCCAAGGCTGTGGGCAAGGTCATCCCTGAGCTGAACGGGAAGC
TCACTGGCATGGCCTTCCGTGTCCCCACTGCCAACGTGTCAGTGGTGGACCTGACCTGCCGTCT
AGAAAAACCTGCCAAATATGATGACATCAAGAAGGTGGTGAAGCAGGCGTCGGAGGGCCCCCTC
AAGGGCATCCTGGGCTACACTGAGCACCAGGTGGTCTCCTCTGACTTCAACAGCGACACCCACT
CCTCCACCTTTGACGCTGGGGCTGGCATTGCCCTCAACGACCACTTTGTCAAGCTCATTTCCTG
GTATGTGGCTGGGGCCAGAGACTGGCTCTTAAAAAGTGCAGGGTCTGGCGCCCTCTGGTGGCTG
GCTCAGAAAAAGGGCCCTGACAACTCTTTACATCTTCTAGGTATGACAACGAGTTCGGATATAG
CAATAGAGTGGTCGATCTGATGGCTCATATGGCTAGCAAAGAGGGAAGCGGAGCTACTAACTTC
AGCCTGCTGAAGCAGGCTGGAGACGTGGAGGAGAACCCTGGACCTATGTGGCAGCTGTTGCTGC
CGACAGCCCTCCTGTTGCTGGTCTCCGCTGGCATGAGAACCGAGGATCTGCCTAAGGCCGTGGT
GTTCCTGGAACCTCAGTGGTACAGAGTGCTGGAAAAGGACAGCGTGACCCTGAAGTGCCAGGGC
GCCTATTCTCCCGAGGACAATAGCACCCAGTGGTTCCACAACGAGAGCCTGATCAGCAGCCAGG
CCAGCAGCTACTTTATCGATGCCGCCACCGTGGACGACAGCGGCGAGTACAGATGCCAGACCAA
TCTGAGCACCCTGAGCGACCCTGTGCAGCTGGAAGTGCACATTGGATGGTTGCTGCTGCAAGCC
CCTAGATGGGTGTTCAAAGAAGAGGACCCCATCCACCTGAGATGCCACTCTTGGAAGAACACAG
CCCTGCACAAAGTGACCTACCTGCAGAACGGCAAGGGCAGAAAGTACTTCCACCACAACAGCGA
CTTCTACATCCCCAAGGCCACACTGAAGGACTCCGGCTCCTACTTCTGCAGAGGCCTGGTCGGC
AGCAAGAACGTGTCCAGCGAGACAGTGAACATCACCATCACACAGGGCCTCGCCGTGTCTACCA
TCAGCAGCTTTTTCCCACCTGGCTATCAGGTGTCCTTCTGCCTGGTCATGGTGCTGCTGTTCGC
CGTGGATACCGGCCTGTACTTCAGCGTCAAGACCAACATCCGGTCCAGCACCAGAGACTGGAAG
GACCACAAGTTCAAGTGGCGGAAGGACCCTCAGGACAAGGGAAGCGGAGCCACAAACTTCTCTC
TGCTGAAGCAGGCAGGAGATGTTGAAGAAAACCCTGGACCTATGGATTGGACCTGGATCCTGTT
TCTGGTGGCCGCTGCCACAAGAGTGCACAGCAATTGGGTCAACGTGATCAGCGACCTGAAGAAG
ATCGAGGACCTGATCCAGAGCATGCACATCGACGCCACACTGTACACCGAGTCCGATGTGCACC
CTAGCTGCAAAGTGACCGCCATGAAGTGCTTTCTGCTGGAACTGCAAGTGATCAGCCTGGAAAG
CGGCGACGCCAGCATCCACGATACCGTGGAAAACCTGATCATCCTGGCCAACAACAGCCTGAGC
AGCAACGGCAATGTGACCGAGAGCGGCTGCAAAGAGTGCGAGGAACTGGAAGAGAAGAACATCA
AAGAGTTCCTCCAGAGCTTCGTCCACATCGTGCAGATGTTCATCAACACCAGCTCTGGCGGAGG
AAGCGGAGGCGGAGGATCTGGTGGTGGTGGATCTGGCGGCGGTGGTAGTGGCGGAGGTTCTCTG
CAAATCACCTGTCCTCCACCTATGAGCGTGGAACACGCCGACATCTGGGTCAAGAGCTACAGCC
TGTACAGCAGAGAGCGGTACATCTGCAACAGCGGCTTCAAGAGAAAGGCCGGCACAAGCAGCCT
GACCGAGTGTGTGCTGAACAAGGCCACAAACGTGGCCCACTGGACCACACCTAGCCTGAAGTGC
ATCAGAGATCCCGCTCTGGTTCATCAGAGGCCTGCCCCTCCATCTACAGTGACAACAGCTGGCG
TGACCCCTCAGCCTGAGTCTCTGTCTCCATCTGGAAAAGAGCCTGCCGCCAGCTCTCCCAGCTC
TAACAATACTGCTGCCACCACAGCCGCTATCGTGCCTGGATCTCAGCTGATGCCTAGCAAGAGC
CCTAGCACCGGCACAACAGAGATCAGCTCTCACGAGAGCAGCCACGGAACACCTTCTCAGACCA
CCGCCAAGAATTGGGAGCTGACAGCCTCTGCCTCTCATCAGCCACCTGGCGTGTACCCACAGGG
CCACTCTGATACAACAGTGGCCATCAGCACCAGCACCGTTCTGCTGTGTGGCCTGTCTGCTGTT
AGCCTGCTGGCCTGCTACCTGAAGTCTAGACAGACACCTCCTCTGGCCAGCGTGGAAATGGAAG
CCATGGAAGCTCTGCCTGTCACATGGGGCACCAGCAGCAGAGATGAGGACCTCGAGAATTGCAG
CCACCACCTGTAAGCGGCCGCGTCGAGTCTAGAGGGCCCGTTTAAACCCGCTGATCAGCCTCGA
CTGTGCCTTCTAGTTGCCAGCCATCTGTTGTTTGCCCCTCCCCCGTGCCTTCCTTGACCCTGGA
AGGTGCCACTCCCACTGTCCTTTCCTAATAAAATGAGGAAATTGCATCGCATTGTCTGAGTAGG
TGTCATTCTATTCTGGGGGGTGGGGTGGGGCAGGACAGCAAGGGGGAGGATTGGGAAGACAATA
GCAGGCATGCTGGGGATGCGGTGGGCTCTATGGATTTGGCTACAGCAACAGGGTGGTGGACCTC
ATGGCCCACATGGCCTCCAAGGAGTAAGACCCCTGGACCACCAGCCCCAGCAAGAGCACAAGAG
GAAGAGAGAGACCCTCACTGCTGGGGAGTCCCTGCCACACTCAGTCCCCCACCACACTGAATCT
CCCCTCCTCACAGTTGCCATGTAGACCCCTTGAAGAGGGGAGGGGCCTAGGGAGCCGCACCTTG
TCATGTACCATCAATAAAGTACCCTGTGCTCAACCAGTTACTTGTCCTGTCTTATTCTAGGGTC
TGGGGCAGAGGGGAGGGAAGCTGGGCTTGTGTCAAGGTGAGACATTCTTGCTGGGGAGGGACCT
GGTATGTTCTCCTCAGACTGAGGGTAGGGCCTCCAAACAGCCTTGCTTGCTTCGAGAACCATTT
GCTTCCCGCTCAGACGTCTTGAGTGCTACAGGAAGCTGGCACCACTACTTCAGAGAACAAGGCC
TTTTCCTCTCCTCGCTCCAGT
exemplary donor template for insertion at GAPDH locus
SEQ ID NO: 213
GAAGACTGTGGATGGCCCCTCCGGGAAACTGTGGCGTGATGGCCGCGGGGCTCTCCAGAACATC
ATCCCTGCCTCTACTGGCGCTGCCAAGGCTGTGGGCAAGGTCATCCCTGAGCTGAACGGGAAGC
TCACTGGCATGGCCTTCCGTGTCCCCACTGCCAACGTGTCAGTGGTGGACCTGACCTGCCGTCT
AGAAAAACCTGCCAAATATGATGACATCAAGAAGGTGGTGAAGCAGGCGTCGGAGGGCCCCCTC
AAGGGCATCCTGGGCTACACTGAGCACCAGGTGGTCTCCTCTGACTTCAACAGCGACACCCACT
CCTCCACCTTTGACGCTGGGGCTGGCATTGCCCTCAACGACCACTTTGTCAAGCTCATTTCCTG
GTATGTGGCTGGGGCCAGAGACTGGCTCTTAAAAAGTGCAGGGTCTGGCGCCCTCTGGTGGCTG
GCTCAGAAAAAGGGCCCTGACAACTCTTTACATCTTCTAGGTATGACAACGAGTTCGGATATAG
CAATAGAGTGGTCGATCTGATGGCTCATATGGCTAGCAAAGAGGGAAGCGGAGCTACTAACTTC
AGCCTGCTGAAGCAGGCTGGAGACGTGGAGGAGAACCCTGGACCTATGTGGCAGCTGTTGCTGC
CGACAGCCCTCCTGTTGCTGGTCTCCGCTGGCATGAGAACCGAGGATCTGCCTAAGGCCGTGGT
GTTCCTGGAACCTCAGTGGTACAGAGTGCTGGAAAAGGACAGCGTGACCCTGAAGTGCCAGGGC
GCCTATTCTCCCGAGGACAATAGCACCCAGTGGTTCCACAACGAGAGCCTGATCAGCAGCCAGG
CCAGCAGCTACTTTATCGATGCCGCCACCGTGGACGACAGCGGCGAGTACAGATGCCAGACCAA
TCTGAGCACCCTGAGCGACCCTGTGCAGCTGGAAGTGCACATTGGATGGTTGCTGCTGCAAGCC
CCTAGATGGGTGTTCAAAGAAGAGGACCCCATCCACCTGAGATGCCACTCTTGGAAGAACACAG
CCCTGCACAAAGTGACCTACCTGCAGAACGGCAAGGGCAGAAAGTACTTCCACCACAACAGCGA
CTTCTACATCCCCAAGGCCACACTGAAGGACTCCGGCTCCTACTTCTGCAGAGGCCTGGTCGGC
AGCAAGAACGTGTCCAGCGAGACAGTGAACATCACCATCACACAGGGCCTCGCCGTGTCTACCA
TCAGCAGCTTTTTCCCACCTGGCTATCAGGTGTCCTTCTGCCTGGTCATGGTGCTGCTGTTCGC
CGTGGATACCGGCCTGTACTTCAGCGTCAAGACCAACATCCGGTCCAGCACCAGAGACTGGAAG
GACCACAAGTTCAAGTGGCGGAAGGACCCTCAGGACAAGGGAAGCGGAGCCACAAACTTCTCTC
TGCTGAAGCAGGCAGGAGATGTTGAAGAAAACCCTGGACCTATGGATTGGACCTGGATCCTGTT
TCTGGTGGCCGCTGCCACAAGAGTGCACAGCAATTGGGTCAACGTGATCAGCGACCTGAAGAAG
ATCGAGGACCTGATCCAGAGCATGCACATCGACGCCACACTGTACACCGAGTCCGATGTGCACC
CTAGCTGCAAAGTGACCGCCATGAAGTGCTTTCTGCTGGAACTGCAAGTGATCAGCCTGGAAAG
CGGCGACGCCAGCATCCACGATACCGTGGAAAACCTGATCATCCTGGCCAACAACAGCCTGAGC
AGCAACGGCAATGTGACCGAGAGCGGCTGCAAAGAGTGCGAGGAACTGGAAGAGAAGAACATCA
AAGAGTTCCTCCAGAGCTTCGTCCACATCGTGCAGATGTTCATCAACACCAGCTCTGGCGGAGG
AAGCGGAGGCGGAGGATCTGGTGGTGGTGGATCTGGCGGCGGTGGTAGTGGCGGAGGTTCTCTG
CAAATCACCTGTCCTCCACCTATGAGCGTGGAACACGCCGACATCTGGGTCAAGAGCTACAGCC
TGTACAGCAGAGAGCGGTACATCTGCAACAGCGGCTTCAAGAGAAAGGCCGGCACAAGCAGCCT
GACCGAGTGTGTGCTGAACAAGGCCACAAACGTGGCCCACTGGACCACACCTAGCCTGAAGTGC
ATCAGAGATCCCGCTCTGGTTCATCAGAGGCCTGCCCCTCCATCTACAGTGACAACAGCTGGCG
TGACCCCTCAGCCTGAGTCTCTGTCTCCATCTGGAAAAGAGCCTGCCGCCAGCTCTCCCAGCTC
TAACAATACTGCTGCCACCACAGCCGCTATCGTGCCTGGATCTCAGCTGATGCCTAGCAAGAGC
CCTAGCACCGGCACAACAGAGATCAGCTCTCACGAGAGCAGCCACGGAACACCTTCTCAGACCA
CCGCCAAGAATTGGGAGCTGACAGCCTCTGCCTCTCATCAGCCACCTGGCGTGTACCCACAGGG
CCACTCTGATACAACAGTGGCCATCAGCACCAGCACCGTTCTGCTGTGTGGCCTGTCTGCTGTT
AGCCTGCTGGCCTGCTACCTGAAGTCTAGACAGACACCTCCTCTGGCCAGCGTGGAAATGGAAG
CCATGGAAGCTCTGCCTGTCACATGGGGCACCAGCAGCAGAGATGAGGACCTCGAGAATTGCAG
CCACCACCTGTAAGCGGCCGCGTCGAGTCTAGAGGGCCCGTTTAAACCCGCTGATCAGCCTCGA
CTGTGCCTTCTAGTTGCCAGCCATCTGTTGTTTGCCCCTCCCCCGTGCCTTCCTTGACCCTGGA
AGGTGCCACTCCCACTGTCCTTTCCTAATAAAATGAGGAAATTGCATCGCATTGTCTGAGTAGG
TGTCATTCTATTCTGGGGGGTGGGGTGGGGCAGGACAGCAAGGGGGAGGATTGGGAAGACAATA
GCAGGCATGCTGGGGATGCGGTGGGCTCTATGGATTTGGCTACAGCAACAGGGTGGTGGACCTC
ATGGCCCACATGGCCTCCAAGGAGTAAGACCCCTGGACCACCAGCCCCAGCAAGAGCACAAGAG
GAAGAGAGAGACCCTCACTGCTGGGGAGTCCCTGCCACACTCAGTCCCCCACCACACTGAATCT
CCCCTCCTCACAGTTGCCATGTAGACCCCTTGAAGAGGGGAGGGGCCTAGGGAGCCGCACCTTG
TCATGTACCATCAATAAAGTACCCTGTGCTCAACCAGTTACTTGTCCTGTCTTATTCTAGGGTC
TGGGGCAGAGGGGAGGGAAGCTGGGCTTGTGTCAAGGTGAGACATTCTTGCTGGGGAGGGACCT
GGTATGTTCTCCTCAGACTGAGGGTAGGGCCTCCAAACAGCCTTGCTTGCTTCGAGAACCATTT
GCTTCCCGCTCAGACGTCTTGAGTGCTACAGGAAGCTGGCACCACTACTTCAGAGAACAAGGCC
TTTTCCTCTCCTCGCTCCAGT
exemplary donor template for insertion at GAPDH locus
SEQ ID NO: 214
GAAGACTGTGGATGGCCCCTCCGGGAAACTGTGGCGTGATGGCCGCGGGGCTCTCCAGAACATC
ATCCCTGCCTCTACTGGCGCTGCCAAGGCTGTGGGCAAGGTCATCCCTGAGCTGAACGGGAAGC
TCACTGGCATGGCCTTCCGTGTCCCCACTGCCAACGTGTCAGTGGTGGACCTGACCTGCCGTCT
AGAAAAACCTGCCAAATATGATGACATCAAGAAGGTGGTGAAGCAGGCGTCGGAGGGCCCCCTC
AAGGGCATCCTGGGCTACACTGAGCACCAGGTGGTCTCCTCTGACTTCAACAGCGACACCCACT
CCTCCACCTTTGACGCTGGGGCTGGCATTGCCCTCAACGACCACTTTGTCAAGCTCATTTCCTG
GTATGTGGCTGGGGCCAGAGACTGGCTCTTAAAAAGTGCAGGGTCTGGCGCCCTCTGGTGGCTG
GCTCAGAAAAAGGGCCCTGACAACTCTTTACATCTTCTAGGTATGACAACGAGTTCGGATATAG
CAATAGAGTGGTCGATCTGATGGCTCATATGGCTAGCAAAGAGGGAAGCGGAGCTACTAACTTC
AGCCTGCTGAAGCAGGCTGGAGACGTGGAGGAGAACCCTGGACCTATGTCAAATATTACAGATC
CACAGATGTGGGATTTTGATGATCTAAATTTCACTGGCATGCCACCTGCAGATGAAGATTACAG
CCCCTGTATGCTAGAAACTGAGACACTCAACAAGTATGTTGTGATCATCGCCTATGCCCTAGTG
TTCCTGCTGAGCCTGCTGGGAAACTCCCTGGTGATGCTGGTCATCTTATACAGCAGGGTCGGCC
GCTCCGTCACTGATGTCTACCTGCTGAACCTGGCCTTGGCCGACCTACTCTTTGCCCTGACCTT
GCCCATCTGGGCCGCCTCCAAGGTGAATGGCTGGATTTTTGGCACATTCCTGTGCAAGGTGGTC
TCACTCCTGAAGGAAGTCAACTTCTACAGTGGCATCCTGCTGTTGGCCTGCATCAGTGTGGACC
GTTACCTGGCCATTGTCCATGCCACACGCACACTGACCCAGAAGCGTCACTTGGTCAAGTTTGT
TTGTCTTGGCTGCTGGGGACTGTCTATGAATCTGTCCCTGCCCTTCTTCCTTTTCCGCCAGGCT
TACCATCCAAACAATTCCAGTCCAGTTTGCTATGAGGTCCTGGGAAATGACACAGCAAAATGGC
GGATGGTGTTGCGGATCCTGCCTCACACCTTTGGCTTCATCGTGCCGCTGTTTGTCATGCTGTT
CTGCTATGGATTCACCCTGCGTACACTGTTTAAGGCCCACATGGGGCAGAAGCACCGAGCCATG
AGGGTCATCTTTGCTGTCGTCCTCATCTTCCTGCTTTGCTGGCTGCCCTACAACCTGGTCCTGC
TGGCAGACACCCTCATGAGGACCCAGGTGATCCAGGAGAGCTGTGAGCGCCGCAACAACATCGG
CCGGGCCCTGGATGCCACTGAGATTCTGGGATTTCTCCATAGCTGCCTCAACCCCATCATCTAC
GCCTTCATCGGCCAAAATTTTCGCCATGGATTCCTCAAGATCCTGGCTATGCATGGCCTGGTCA
GCAAGGAGTTCTTGGCACGTCATCGTGTTACCTCCTACACTTCTTCGTCTGTCAATGTCTCTTC
CAACCTCTGAATTTGGCTACAGCAACAGGGTGGTGGACCTCATGGCCCACATGGCCTCCAAGGA
GTAAGACCCCTGGACCACCAGCCCCAGCAAGAGCACAAGAGGAAGAGAGAGACCCTCACTGCTG
GGGAGTCCCTGCCACACTCAGTCCCCCACCACACTGAATCTCCCCTCCTCACAGTTGCCATGTA
GACCCCTTGAAGAGGGGAGGGGCCTAGGGAGCCGCACCTTGTCATGTACCATCAATAAAGTACC
CTGTGCTCAACCAGTTACTTGTCCTGTCTTATTCTAGGGTCTGGGGCAGAGGGGAGGGAAGCTG
GGCTTGTGTCAAGGTGAGACATTCTTGCTGGGGAGGGACCTGGTATGTTCTCCTCAGACTGAGG
GTAGGGCCTCCAAACAGCCTTGCTTGCTTCGAGAACCATTTGCTTCCCGCTCAGACGTCTTGAG
TGCTACAGGAAGCTGGCACCACTACTTCAGAGAACAAGGCCTTTTCCTCTCCTCGCTCCAGT
exemplary donor template for insertion at GAPDH locus
SEQ ID NO: 215
GAAGACTGTGGATGGCCCCTCCGGGAAACTGTGGCGTGATGGCCGCGGGGCTCTCCAGAACATC
ATCCCTGCCTCTACTGGCGCTGCCAAGGCTGTGGGCAAGGTCATCCCTGAGCTGAACGGGAAGC
TCACTGGCATGGCCTTCCGTGTCCCCACTGCCAACGTGTCAGTGGTGGACCTGACCTGCCGTCT
AGAAAAACCTGCCAAATATGATGACATCAAGAAGGTGGTGAAGCAGGCGTCGGAGGGCCCCCTC
AAGGGCATCCTGGGCTACACTGAGCACCAGGTGGTCTCCTCTGACTTCAACAGCGACACCCACT
CCTCCACCTTTGACGCTGGGGCTGGCATTGCCCTCAACGACCACTTTGTCAAGCTCATTTCCTG
GTATGTGGCTGGGGCCAGAGACTGGCTCTTAAAAAGTGCAGGGTCTGGCGCCCTCTGGTGGCTG
GCTCAGAAAAAGGGCCCTGACAACTCTTTACATCTTCTAGGTATGACAACGAGTTCGGATATAG
CAATAGAGTGGTCGATCTGATGGCTCATATGGCTAGCAAAGAGGGAAGCGGAGCTACTAACTTC
AGCCTGCTGAAGCAGGCTGGAGACGTGGAGGAGAACCCTGGACCTATGGAGTTGAGGAAGTACG
GCCCTGGAAGACTGGCGGGGACAGTTATAGGAGGAGCTGCTCAGAGTAAATCACAGACTAAATC
AGACTCAATCACAAAAGAGTTCCTGCCAGGCCTTTACACAGCCCCTTCCTCCCCGTTCCCGCCC
TCACAGGTGAGTGACCACCAAGTGCTAAATGACGCCGAGGTTGCCGCCCTCCTGGAGAACTTCA
GCTCTTCCTATGACTATGGAGAAAACGAGAGTGACTCGTGCTGTACCTCCCCGCCCTGCCCACA
GGACTTCAGCCTGAACTTCGACCGGGCCTTCCTGCCAGCCCTCTACAGCCTCCTCTTTCTGCTG
GGGCTGCTGGGCAACGGCGCGGTGGCAGCCGTGCTGCTGAGCCGGCGGACAGCCCTGAGCAGCA
CCGACACCTTCCTGCTCCACCTAGCTGTAGCAGACACGCTGCTGGTGCTGACACTGCCGCTCTG
GGCAGTGGACGCTGCCGTCCAGTGGGTCTTTGGCTCTGGCCTCTGCAAAGTGGCAGGTGCCCTC
TTCAACATCAACTTCTACGCAGGAGCCCTCCTGCTGGCCTGCATCAGCTTTGACCGCTACCTGA
ACATAGTTCATGCCACCCAGCTCTACCGCCGGGGGCCCCCGGCCCGCGTGACCCTCACCTGCCT
GGCTGTCTGGGGGCTCTGCCTGCTTTTCGCCCTCCCAGACTTCATCTTCCTGTCGGCCCACCAC
GACGAGCGCCTCAACGCCACCCACTGCCAATACAACTTCCCACAGGTGGGCCGCACGGCTCTGC
GGGTGCTGCAGCTGGTGGCTGGCTTTCTGCTGCCCCTGCTGGTCATGGCCTACTGCTATGCCCA
CATCCTGGCCGTGCTGCTGGTTTCCAGGGGCCAGCGGCGCCTGCGGGCCATGCGGCTGGTGGTG
GTGGTCGTGGTGGCCTTTGCCCTCTGCTGGACCCCCTATCACCTGGTGGTGCTGGTGGACATCC
TCATGGACCTGGGCGCTTTGGCCCGCAACTGTGGCCGAGAAAGCAGGGTAGACGTGGCCAAGTC
GGTCACCTCAGGCCTGGGCTACATGCACTGCTGCCTCAACCCGCTGCTCTATGCCTTTGTAGGG
GTCAAGTTCCGGGAGCGGATGTGGATGCTGCTCTTGCGCCTGGGCTGCCCCAACCAGAGAGGGC
TCCAGAGGCAGCCATCGTCTTCCCGCCGGGATTCATCCTGGTCTGAGACCTCAGAGGCCTCCTA
CTCGGGCTTGTGAATTTGGCTACAGCAACAGGGTGGTGGACCTCATGGCCCACATGGCCTCCAA
GGAGTAAGACCCCTGGACCACCAGCCCCAGCAAGAGCACAAGAGGAAGAGAGAGACCCTCACTG
CTGGGGAGTCCCTGCCACACTCAGTCCCCCACCACACTGAATCTCCCCTCCTCACAGTTGCCAT
GTAGACCCCTTGAAGAGGGGAGGGGCCTAGGGAGCCGCACCTTGTCATGTACCATCAATAAAGT
ACCCTGTGCTCAACCAGTTACTTGTCCTGTCTTATTCTAGGGTCTGGGGCAGAGGGGAGGGAAG
CTGGGCTTGTGTCAAGGTGAGACATTCTTGCTGGGGAGGGACCTGGTATGTTCTCCTCAGACTG
AGGGTAGGGCCTCCAAACAGCCTTGCTTGCTTCGAGAACCATTTGCTTCCCGCTCAGACGTCTT
GAGTGCTACAGGAAGCTGGCACCACTACTTCAGAGAACAAGGCCTTTTCCTCTCCTCGCTCCAG
T
exemplary donor template for insertion at GAPDH locus
SEQ ID NO: 216
GAAGACTGTGGATGGCCCCTCCGGGAAACTGTGGCGTGATGGCCGCGGGGCTCTCCAGAACATC
ATCCCTGCCTCTACTGGCGCTGCCAAGGCTGTGGGCAAGGTCATCCCTGAGCTGAACGGGAAGC
TCACTGGCATGGCCTTCCGTGTCCCCACTGCCAACGTGTCAGTGGTGGACCTGACCTGCCGTCT
AGAAAAACCTGCCAAATATGATGACATCAAGAAGGTGGTGAAGCAGGCGTCGGAGGGCCCCCTC
AAGGGCATCCTGGGCTACACTGAGCACCAGGTGGTCTCCTCTGACTTCAACAGCGACACCCACT
CCTCCACCTTTGACGCTGGGGCTGGCATTGCCCTCAACGACCACTTTGTCAAGCTCATTTCCTG
GTATGTGGCTGGGGCCAGAGACTGGCTCTTAAAAAGTGCAGGGTCTGGCGCCCTCTGGTGGCTG
GCTCAGAAAAAGGGCCCTGACAACTCTTTACATCTTCTAGGTATGACAACGAGTTCGGATATAG
CAATAGAGTGGTCGATCTGATGGCTCATATGGCTAGCAAAGAGGGAAGCGGAGCTACTAACTTC
AGCCTGCTGAAGCAGGCTGGAGACGTGGAGGAGAACCCTGGACCTATGGTCCTTGAGGTGAGTG
ACCACCAAGTGCTAAATGACGCCGAGGTTGCCGCCCTCCTGGAGAACTTCAGCTCTTCCTATGA
CTATGGAGAAAACGAGAGTGACTCGTGCTGTACCTCCCCGCCCTGCCCACAGGACTTCAGCCTG
AACTTCGACCGGGCCTTCCTGCCAGCCCTCTACAGCCTCCTCTTTCTGCTGGGGCTGCTGGGCA
ACGGCGCGGTGGCAGCCGTGCTGCTGAGCCGGCGGACAGCCCTGAGCAGCACCGACACCTTCCT
GCTCCACCTAGCTGTAGCAGACACGCTGCTGGTGCTGACACTGCCGCTCTGGGCAGTGGACGCT
GCCGTCCAGTGGGTCTTTGGCTCTGGCCTCTGCAAAGTGGCAGGTGCCCTCTTCAACATCAACT
TCTACGCAGGAGCCCTCCTGCTGGCCTGCATCAGCTTTGACCGCTACCTGAACATAGTTCATGC
CACCCAGCTCTACCGCCGGGGGCCCCCGGCCCGCGTGACCCTCACCTGCCTGGCTGTCTGGGGG
CTCTGCCTGCTTTTCGCCCTCCCAGACTTCATCTTCCTGTCGGCCCACCACGACGAGCGCCTCA
ACGCCACCCACTGCCAATACAACTTCCCACAGGTGGGCCGCACGGCTCTGCGGGTGCTGCAGCT
GGTGGCTGGCTTTCTGCTGCCCCTGCTGGTCATGGCCTACTGCTATGCCCACATCCTGGCCGTG
CTGCTGGTTTCCAGGGGCCAGCGGCGCCTGCGGGCCATGCGGCTGGTGGTGGTGGTCGTGGTGG
CCTTTGCCCTCTGCTGGACCCCCTATCACCTGGTGGTGCTGGTGGACATCCTCATGGACCTGGG
CGCTTTGGCCCGCAACTGTGGCCGAGAAAGCAGGGTAGACGTGGCCAAGTCGGTCACCTCAGGC
CTGGGCTACATGCACTGCTGCCTCAACCCGCTGCTCTATGCCTTTGTAGGGGTCAAGTTCCGGG
AGCGGATGTGGATGCTGCTCTTGCGCCTGGGCTGCCCCAACCAGAGAGGGCTCCAGAGGCAGCC
ATCGTCTTCCCGCCGGGATTCATCCTGGTCTGAGACCTCAGAGGCCTCCTACTCGGGCTTGTGA
ATTTGGCTACAGCAACAGGGTGGTGGACCTCATGGCCCACATGGCCTCCAAGGAGTAAGACCCC
TGGACCACCAGCCCCAGCAAGAGCACAAGAGGAAGAGAGAGACCCTCACTGCTGGGGAGTCCCT
GCCACACTCAGTCCCCCACCACACTGAATCTCCCCTCCTCACAGTTGCCATGTAGACCCCTTGA
AGAGGGGAGGGGCCTAGGGAGCCGCACCTTGTCATGTACCATCAATAAAGTACCCTGTGCTCAA
CCAGTTACTTGTCCTGTCTTATTCTAGGGTCTGGGGCAGAGGGGAGGGAAGCTGGGCTTGTGTC
AAGGTGAGACATTCTTGCTGGGGAGGGACCTGGTATGTTCTCCTCAGACTGAGGGTAGGGCCTC
CAAACAGCCTTGCTTGCTTCGAGAACCATTTGCTTCCCGCTCAGACGTCTTGAGTGCTACAGGA
AGCTGGCACCACTACTTCAGAGAACAAGGCCTTTTCCTCTCCTCGCTCCAGT
exemplary donor template for insertion at GAPDH locus
SEQ ID NO: 217
GAAGACTGTGGATGGCCCCTCCGGGAAACTGTGGCGTGATGGCCGCGGGGCTCTCCAGAACATC
ATCCCTGCCTCTACTGGCGCTGCCAAGGCTGTGGGCAAGGTCATCCCTGAGCTGAACGGGAAGC
TCACTGGCATGGCCTTCCGTGTCCCCACTGCCAACGTGTCAGTGGTGGACCTGACCTGCCGTCT
AGAAAAACCTGCCAAATATGATGACATCAAGAAGGTGGTGAAGCAGGCGTCGGAGGGCCCCCTC
AAGGGCATCCTGGGCTACACTGAGCACCAGGTGGTCTCCTCTGACTTCAACAGCGACACCCACT
CCTCCACCTTTGACGCTGGGGCTGGCATTGCCCTCAACGACCACTTTGTCAAGCTCATTTCCTG
GTATGTGGCTGGGGCCAGAGACTGGCTCTTAAAAAGTGCAGGGTCTGGCGCCCTCTGGTGGCTG
GCTCAGAAAAAGGGCCCTGACAACTCTTTACATCTTCTAGGTATGACAACGAGTTCGGATATAG
CAATAGAGTGGTCGATCTGATGGCTCATATGGCTAGCAAAGAGGGAAGCGGAGCTACTAACTTC
AGCCTGCTGAAGCAGGCTGGAGACGTGGAGGAGAACCCTGGACCTATGGATTATCAAGTGTCAA
GTCCAATCTATGACATCAATTATTATACATCGGAGCCCTGCCAAAAAATCAATGTGAAGCAAAT
CGCAGCCCGCCTCCTGCCTCCGCTCTACTCACTGGTGTTCATCTTTGGTTTTGTGGGCAACATG
CTGGTCATCCTCATCCTGATAAACTGCAAAAGGCTGAAGAGCATGACTGACATCTACCTGCTCA
ACCTGGCCATCTCTGACCTGTTTTTCCTTCTTACTGTCCCCTTCTGGGCTCACTATGCTGCCGC
CCAGTGGGACTTTGGAAATACAATGTGTCAACTCTTGACAGGGCTCTATTTTATAGGCTTCTTC
TCTGGAATCTTCTTCATCATCCTCCTGACAATCGATAGGTACCTGGCTGTCGTCCATGCTGTGT
TTGCTTTAAAAGCCAGGACGGTCACCTTTGGGGTGGTGACAAGTGTGATCACTTGGGTGGTGGC
TGTGTTTGCGTCTCTCCCAGGAATCATCTTTACCAGATCTCAAAAAGAAGGTCTTCATTACACC
TGCAGCTCTCATTTTCCATACAGTCAGTATCAATTCTGGAAGAATTTCCAGACATTAAAGATAG
TCATCTTGGGGCTGGTCCTGCCGCTGCTTGTCATGGTCATCTGCTACTCGGGAATCCTAAAAAC
TCTGCTTCGGTGTCGAAATGAGAAGAAGAGGCACAGGGCTGTGAGGCTTATCTTCACCATCATG
ATTGTTTATTTTCTCTTCTGGGCTCCCTACAACATTGTCCTTCTCCTGAACACCTTCCAGGAAT
TCTTTGGCCTGAATAATTGCAGTAGCTCTAACAGGTTGGACCAAGCTATGCAGGTGACAGAGAC
TCTTGGGATGACGCACTGCTGCATCAACCCCATCATCTATGCCTTTGTCGGGGAGAAGTTCAGA
AACTACCTCTTAGTCTTCTTCCAAAAGCACATTGCCAAACGCTTCTGCAAATGCTGTTCTATTT
TCCAGCAAGAGGCTCCCGAGCGAGCAAGCTCAGTTTACACCCGATCCACTGGGGAGCAGGAAAT
ATCTGTGGGCTTGTGAATTTGGCTACAGCAACAGGGTGGTGGACCTCATGGCCCACATGGCCTC
CAAGGAGTAAGACCCCTGGACCACCAGCCCCAGCAAGAGCACAAGAGGAAGAGAGAGACCCTCA
CTGCTGGGGAGTCCCTGCCACACTCAGTCCCCCACCACACTGAATCTCCCCTCCTCACAGTTGC
CATGTAGACCCCTTGAAGAGGGGAGGGGCCTAGGGAGCCGCACCTTGTCATGTACCATCAATAA
AGTACCCTGTGCTCAACCAGTTACTTGTCCTGTCTTATTCTAGGGTCTGGGGCAGAGGGGAGGG
AAGCTGGGCTTGTGTCAAGGTGAGACATTCTTGCTGGGGAGGGACCTGGTATGTTCTCCTCAGA
CTGAGGGTAGGGCCTCCAAACAGCCTTGCTTGCTTCGAGAACCATTTGCTTCCCGCTCAGACGT
CTTGAGTGCTACAGGAAGCTGGCACCACTACTTCAGAGAACAAGGCCTTTTCCTCTCCTCGCTC
CAGT
exemplary donor template for insertion at GAPDH locus
SEQ ID NO: 218
GAAGACTGTGGATGGCCCCTCCGGGAAACTGTGGCGTGATGGCCGCGGGGCTCTCCAGAACATC
ATCCCTGCCTCTACTGGCGCTGCCAAGGCTGTGGGCAAGGTCATCCCTGAGCTGAACGGGAAGC
TCACTGGCATGGCCTTCCGTGTCCCCACTGCCAACGTGTCAGTGGTGGACCTGACCTGCCGTCT
AGAAAAACCTGCCAAATATGATGACATCAAGAAGGTGGTGAAGCAGGCGTCGGAGGGCCCCCTC
AAGGGCATCCTGGGCTACACTGAGCACCAGGTGGTCTCCTCTGACTTCAACAGCGACACCCACT
CCTCCACCTTTGACGCTGGGGCTGGCATTGCCCTCAACGACCACTTTGTCAAGCTCATTTCCTG
GTATGTGGCTGGGGCCAGAGACTGGCTCTTAAAAAGTGCAGGGTCTGGCGCCCTCTGGTGGCTG
GCTCAGAAAAAGGGCCCTGACAACTCTTTACATCTTCTAGGTATGACAACGAGTTCGGATATAG
CAATAGAGTGGTCGATCTGATGGCTCATATGGCTAGCAAAGAGGGAAGCGGAGCTACTAACTTC
AGCCTGCTGAAGCAGGCTGGAGACGTGGAGGAGAACCCTGGACCTATGCTGTCCACATCTCGTT
CTCGGTTTATCAGAAATACCAACGAGAGCGGTGAAGAAGTCACCACCTTTTTTGATTATGATTA
CGGTGCTCCCTGTCATAAATTTGACGTGAAGCAAATTGGGGCCCAACTCCTGCCTCCGCTCTAC
TCGCTGGTGTTCATCTTTGGTTTTGTGGGCAACATGCTGGTCGTCCTCATCTTAATAAACTGCA
AAAAGCTGAAGTGCTTGACTGACATTTACCTGCTCAACCTGGCCATCTCTGATCTGCTTTTTCT
TATTACTCTCCCATTGTGGGCTCACTCTGCTGCAAATGAGTGGGTCTTTGGGAATGCAATGTGC
AAATTATTCACAGGGCTGTATCACATCGGTTATTTTGGCGGAATCTTCTTCATCATCCTCCTGA
CAATCGATAGATACCTGGCTATTGTCCATGCTGTGTTTGCTTTAAAAGCCAGGACGGTCACCTT
TGGGGTGGTGACAAGTGTGATCACCTGGTTGGTGGCTGTGTTTGCTTCTGTCCCAGGAATCATC
TTTACTAAATGCCAGAAAGAAGATTCTGTTTATGTCTGTGGCCCTTATTTTCCACGAGGATGGA
ATAATTTCCACACAATAATGAGGAACATTTTGGGGCTGGTCCTGCCGCTGCTCATCATGGTCAT
CTGCTACTCGGGAATCCTGAAAACCCTGCTTCGGTGTCGAAACGAGAAGAAGAGGCATAGGGCA
GTGAGAGTCATCTTCACCATCATGATTGTTTACTTTCTCTTCTGGACTCCCTATAATATTGTCA
TTCTCCTGAACACCTTCCAGGAATTCTTCGGCCTGAGTAACTGTGAAAGCACCAGTCAACTGGA
CCAAGCCACGCAGGTGACAGAGACTCTTGGGATGACTCACTGCTGCATCAATCCCATCATCTAT
GCCTTCGTTGGGGAGAAGTTCAGAAGCCTTTTTCACATAGCTCTTGGCTGTAGGATTGCCCCAC
TCCAAAAACCAGTGTGTGGAGGTCCAGGAGTGAGACCAGGAAAGAATGTGAAAGTGACTACACA
AGGACTCCTCGATGGTCGTGGAAAAGGAAAGTCAATTGGCAGAGCCCCTGAAGCCAGTCTTCAG
GACAAAGAAGGAGCCTAGATTTGGCTACAGCAACAGGGTGGTGGACCTCATGGCCCACATGGCC
TCCAAGGAGTAAGACCCCTGGACCACCAGCCCCAGCAAGAGCACAAGAGGAAGAGAGAGACCCT
CACTGCTGGGGAGTCCCTGCCACACTCAGTCCCCCACCACACTGAATCTCCCCTCCTCACAGTT
GCCATGTAGACCCCTTGAAGAGGGGAGGGGCCTAGGGAGCCGCACCTTGTCATGTACCATCAAT
AAAGTACCCTGTGCTCAACCAGTTACTTGTCCTGTCTTATTCTAGGGTCTGGGGCAGAGGGGAG
GGAAGCTGGGCTTGTGTCAAGGTGAGACATTCTTGCTGGGGAGGGACCTGGTATGTTCTCCTCA
GACTGAGGGTAGGGCCTCCAAACAGCCTTGCTTGCTTCGAGAACCATTIGCTTCCCGCTCAGAC
GTCTTGAGTGCTACAGGAAGCTGGCACCACTACTTCAGAGAACAAGGCCTTTTCCTCTCCTCGC
TCCAGT

### Methods of Editing the Genome of a Cell for Gain-of-Function Modifications

[0465] In one aspect, the present disclosure provides methods of editing the genome of a cell. In certain embodiments, the method comprises contacting the cell with a nuclease that causes a break within an endogenous coding sequence of an essential gene in the cell wherein the essential gene encodes at least one gene product that is required for survival and/or proliferation of the cell. The cell is also contacted with (i) a donor template that comprises a knock-in cassette comprising an exogenous coding sequence for a gene product of interest in frame with and downstream (3′) of an exogenous coding sequence or partial coding sequence of the essential gene and/or (ii) a donor template that comprises a knock-in cassette comprising an exogenous coding sequence for a gene product of interest in frame with and upstream (5′) of an exogenous coding sequence or partial coding sequence of the essential gene (FIG. 3D). The knock-in cassette is integrated into the genome of the cell by homology-directed repair (HDR) of the break, resulting in a genome-edited cell that expresses the gene product of interest and the gene product encoded by the essential gene that is required for survival and/or proliferation of the cell, or a functional variant thereof. The genetically modified “knock-in” cell survives and proliferates to produce progeny cells with genomes that also include the exogenous coding sequence for the gene product of interest. This is illustrated in FIG. 3A for an exemplary method.

[0466] If the knock-in cassette is not properly integrated into the genome of the cell, undesired editing events that result from the break, e.g., NHEJ-mediated creation of indels, may produce a non-functional, e.g., out of frame, version of the essential gene. This produces a “knock-out” cell when the editing efficiency of the nuclease is high enough to disrupt both alleles. In certain embodiments, this produces a “knock-out” cell when the editing efficiency of the nuclease is high enough to disrupt one allele. Without sufficient functional copies of the essential gene these “knock-out” cells are unable to survive and do not produce any progeny cells.

[0467] In some embodiments, the present disclosure provides methods of editing the genome of a cell. In certain embodiments, the method comprises contacting the cell with a nuclease that causes a break within an endogenous non-coding sequence of an essential gene in the cell wherein the essential gene encodes at least one gene product that is required for survival and/or proliferation of the cell. In some embodiments, such a break within an endogenous non-coding sequence alters a functional region of an essential gene that influences post-transcriptional modification patterns, e.g., mRNA splicing, RNA stability, RNA editing, RNA interference, etc. In some embodiments, such a break within an endogenous non-coding sequence occurs in a functional region of the essential gene, for example, but not limited to: a splicesome target site (e.g., a 5′ splice donor site, an intron branch point sequence, a 3′ splice acceptor site, and/or a polypyrimidine tract), an intronic splicing silencer, an intronic splicing enhancer, an exonic splicing silencer, an exonic splicing enhancer, an endogenous RNA interference binding site (e.g., micro RNA, small interfering RNA, etc.), an endogenous RNA editing machinery binding site (e.g., a binding site for adenosine deaminases, cytidine deaminases, etc.), or combinations thereof. In some embodiments, the nuclease causes a break at or near where an intron borders an exon in an essential gene, reducing or disrupting the function of the essential gene.

[0468] Since the “knock-in” cells survive and the “knock-out” cells do not survive, the method automatically selects for the “knock-in” cells when it is applied to a population of starting cells. Significantly, in certain embodiments, the method does not require high knock-in efficiencies because of this automatic selection aspect. It is therefore particularly suitable for methods where the donor template is a dsDNA (e.g., a plasmid) where knock-in efficiencies are often below 5%. As noted in the exemplary method of FIG. 3C, in some embodiments some of the cells in the population of starting cells may remain unedited, i.e., unaffected by the nuclease. These cells would also survive and produce progeny with genomes that do not include the exogenous coding sequence for the gene product of interest. When the nuclease editing efficiency is high, e.g., about 60-90%, or higher the percentage of unedited cells will be relatively low as compared to the percentage of genetically modified cells. In some embodiments, high nuclease editing efficiencies (e.g., greater than 65%, greater than 70%, greater than 75%, greater than 80%, greater than 85%, greater than 90%, or greater than 95%) facilitates efficient population wide transgene integration, as the percentage of unedited cells will be relatively low as compared to the percentage of genetically modified cells. In some embodiments of the methods disclosed herein, at least about 65% of the cells (e.g., about 70%, about 75%, about 80%, about 85%, about 90%, about 91%, about 92%, about 93%, about 94%, about 95%, about 96%, about 97%, about 98%, or about 99% of the cells) are edited by a nuclease, e.g., a Cas12a, Cas9, Cas12b, Cas12c, Cas12e, CasX, or CasΦ (Cas12j), or a variant thereof (e.g., a variant with a high editing efficiency). In some embodiments, an RNP containing a CRISPR nuclease (e.g., Cas12a, Cas9, Cas12b, Cas12c, Cas12e, CasX, or CasΦ (Cas12j), or a variant thereof (e.g., a variant with a high editing efficiency)) and a guide are capable of cleaving the locus of an essential gene (e.g., a terminal exon in the locus of any essential gene provided in Table 3) in at least 65% of the cells in a population of cells (e.g., at least 65%, at least 70%, at least 75%, at least 80%, at least 85%, at least 90%, at least 91%, at least 92%, at least 93%, at least 94%, at least 95%, at least 96%, at least 97%, at least 98%, or at least 99% of the cells in a population of cells). In some embodiments, an RNP containing a CRISPR nuclease (e.g., Cas12a, Cas9, Cas12b, Cas12c, Cas12e, CasX, or CasΦ (Cas12j), or a variant thereof (e.g., a variant with a high editing efficiency)) and a guide are capable of inducing knock-in cassette integration at a locus of an essential gene (e.g., a terminal exon in the locus of any essential gene provided in Table 3) in at least 65% of the cells in a population of cells (e.g., at least 65%, at least 70%, at least 75%, at least 80%, at least 85%, at least 90%, at least 91%, at least 92%, at least 93%, at least 94%, at least 95%, at least 96%, at least 97%, at least 98%, or at least 99% of the cells in a population of cells), e.g., at between 4 days and 10 days (e.g., 4 days, 5 days, 6 days, 7 days, 8 days, 9 days or 10 days) after the cells in the population of cells is contacted with the RNP containing a CRISPR nuclease. In some embodiments, editing efficiency is determined prior to target cell die off, e.g., at day 1 and/or day 2 post transfection or transduction. In some embodiments, editing efficiency measured at day 1 and/or day 2 post transfection or transduction may not capture the complete proportion of cells for which editing occurred, as in some embodiments, certain editing events may result in near immediate and/or swift cell death. In some embodiments, near immediate and/or swift cell death may be any period of time less than 48 hours post transfection or transduction, for example, less than 48 hours, less than 44 hours, less than 40 hours, less than 36 hours, less than 32 hours, less than 28 hours, less than 24 hours, less than 20 hours, less than 16 hours, less than 15 hours, less than 14 hours, less than 13 hours, less than 12 hours, less than 11 hours, less than 10 hours, less than 9 hours, less than 8 hours, less than 7 hours, less than 6 hours, less than 5 hours, less than 4 hours, less than 3 hours, less than 2 hours, or less than 1 hour after transfection or transduction.

[0469] In some embodiments, the nuclease causes a double-strand break. In some embodiments the nuclease causes a single-strand break, e.g., in some embodiments the nuclease is a nickase. In some embodiments the nuclease is a prime editor which comprises a nickase domain fused to a reverse transcriptase domain. In some embodiments the nuclease is an RNA-guided prime editor and the gRNA comprises the donor template. In some embodiments a dual-nickase system is used which causes a double-strand break via two single-strand breaks on opposing strands of a double-stranded DNA, e.g., genomic DNA of the cell.

[0470] In some embodiments, the present disclosure provides methods suitable for high-efficiency knock-in (e.g., a high proportion of a cell population comprises a knock-in allele), overcoming a major manufacturing challenge. In some embodiments, high-efficiency knock-in results in at least 65% of the cells in a population of cells comprising a knock-in allele (e.g., at least 65%, at least 70%, at least 75%, at least 80%, at least 85%, at least 90%, at least 91%, at least 92%, at least 93%, at least 94%, at least 95%, at least 96%, at least 97%, at least 98%, or at least 99% of the cells in a population of cells comprise a knock-in allele). Historically, gene of interest knock-in using plasmid vectors results in efficiencies typically between 0.1 and 5% (see e.g., Zhu et al., CRISPR/Cas-Mediated Selection-free Knockin Strategy in Human Embryonic Stem Cells. Stem Cell Reports. 2015; 4(6):1103-1111), this low knock-in efficiency can result in a need for extensive time and resources devoted to screening potentially edited clones.

[0471] In some embodiments, a gene of interest knocked into a cell may have a role in effector function, specificity, stealth, persistence, homing/chemotaxis, and/or resistance to certain chemicals (see for example, Saetersmoen et al., Seminars in Immunopathology, 2019).

[0472] In certain embodiments, the present disclosure provides methods for creation of knock-in cells that maintain high levels of expression regardless of age, differentiation status, and/or exogenous conditions. For example, in some embodiments, an integrated cargo is expressed at an optimal level with a desired subcellular localization as a function of an insertion site. In some embodiments, the present disclosure provides such cells.

### Systems for Editing the Genome of a Cell

[0473] In one aspect the present disclosure provides systems for editing the genome of a cell. In some embodiments, the system comprises the cell, a nuclease that causes a break within an endogenous coding sequence of an essential gene of the cell, wherein the essential gene encodes a gene product that is required for survival and/or proliferation of the cell, and a donor template that comprises a knock-in cassette comprising an exogenous coding sequence for a gene product of interest in frame with and downstream (3′) of an exogenous coding sequence or partial coding sequence of the essential gene.

[0474] In some embodiments, the nuclease causes a double-strand break. In some embodiments the nuclease causes a single-strand break, e.g., in some embodiments the nuclease is a nickase. In some embodiments the nuclease is a prime editor which comprises a nickase domain fused to a reverse transcriptase domain. In some embodiments the nuclease is an RNA-guided prime editor and the gRNA comprises the donor template. In some embodiments a dual-nickase system is used which causes a double-strand break via two single-strand breaks on opposing strand of a double-stranded DNA, e.g., genomic DNA of the cell.

[0475] In one aspect, genome editing systems of the present disclosure may be used, for example, to edit stem cells. In some embodiments, genome editing systems of the present disclosure include at least two components adapted from naturally occurring CRISPR systems: a guide RNA (gRNA) and an RNA-guided nuclease. These two components form a complex that is capable of associating with a specific nucleic acid sequence and editing the DNA in or around that nucleic acid sequence, for instance by making one or more of a single-strand break (an SSB or nick), a double-strand break (a DSB) and/or a point mutation.

[0476] Naturally occurring CRISPR systems are organized evolutionarily into two classes and five types (Makarova et al. Nat Rev Microbiol. 2011 June; 9(6): 467-477 (“Makarova”)), and while genome editing systems of the present disclosure may adapt components of any type or class of naturally occurring CRISPR system, the embodiments presented herein are generally adapted from Class 2, and type II or V CRISPR systems. Class 2 systems, which encompass types II and V, are characterized by relatively large, multidomain RNA-guided nuclease proteins (e.g., Cas9 or Cpf1) and one or more guide RNAs (e.g., a crRNA and, optionally, a tracrRNA) that form ribonucleoprotein (RNP) complexes that associate with (i.e., target) and cleave specific loci complementary to a targeting (or spacer) sequence of the crRNA. Genome editing systems according to the present disclosure similarly target and edit cellular DNA sequences, but differ significantly from CRISPR systems occurring in nature. For example, the unimolecular guide RNAs described herein do not occur in nature, and both guide RNAs and RNA-guided nucleases according to this disclosure may incorporate any number of non-naturally occurring modifications.

[0477] Genome editing systems can be implemented (e.g., administered or delivered to a cell or a subject) in a variety of ways, and different implementations may be suitable for distinct applications. For instance, a genome editing system is implemented, in certain embodiments, as a protein/RNA complex (a ribonucleoprotein, or RNP), which can be included in a pharmaceutical composition that optionally includes a pharmaceutically acceptable carrier and/or an encapsulating agent, such as a lipid or polymer micro- or nano-particle, micelle, liposome, etc. In certain embodiments, a genome editing system is implemented as one or more nucleic acids encoding the RNA-guided nuclease and guide RNA components described above (optionally with one or more additional components); in certain embodiments, the genome editing system is implemented as one or more vectors comprising such nucleic acids, for instance a viral vector such as an adeno-associated virus; and in certain embodiments, the genome editing system is implemented as a combination of any of the foregoing. Additional or modified implementations that operate according to the principles set forth herein will be apparent to the skilled artisan and are within the scope of this disclosure.

[0478] It should be noted that the genome editing systems of the present disclosure can be targeted to a single specific nucleotide sequence, or may be targeted to—and capable of editing in parallel—two or more specific nucleotide sequences through the use of two or more guide RNAs. The use of multiple gRNAs is referred to as “multiplexing” throughout this disclosure, and can be employed to target multiple, unrelated target sequences of interest, or to form multiple SSBs or DSBs within a single target domain and, in some cases, to generate specific edits within such target domain. For example, International Patent Publication No. WO 2015/138510 by Maeder et al. (“Maeder”) describes a genome editing system for correcting a point mutation (C.2991+1655A to G) in the human CEP290 gene that results in the creation of a cryptic splice site, which in turn reduces or eliminates the function of the gene. The genome editing system of Maeder utilizes two guide RNAs targeted to sequences on either side of (i.e., flanking) the point mutation, and forms DSBs that flank the mutation. This, in turn, promotes deletion of the intervening sequence, including the mutation, thereby eliminating the cryptic splice site and restoring normal gene function.

[0479] As another example, WO 2016/073990 by Cotta-Ramusino, et al. (“Cotta-Ramusino”) describes a genome editing system that utilizes two gRNAs in combination with a Cas9 nickase (a Cas9 that makes a single strand nick such as S. pyogenes D10A), an arrangement termed a “dual-nickase system.” The dual-nickase system of Cotta-Ramusino is configured to make two nicks on opposite strands of a sequence of interest that are offset by one or more nucleotides, which nicks combine to create a double strand break having an overhang (5′ in the case of Cotta-Ramusino, though 3′ overhangs are also possible). The overhang, in turn, can facilitate homology directed repair events in some circumstances. And, as another example, WO 2015/070083 by Palestrant et al. (“Palestrant”) describes a gRNA targeted to a nucleotide sequence encoding Cas9 (referred to as a “governing RNA”), which can be included in a genome editing system comprising one or more additional gRNAs to permit transient expression of a Cas9 that might otherwise be constitutively expressed, for example in some virally transduced cells. These multiplexing applications are intended to be exemplary, rather than limiting, and the skilled artisan will appreciate that other applications of multiplexing are generally compatible with the genome editing systems described here.

[0480] Genome editing systems can, in some instances, form double strand breaks that are repaired by cellular DNA double-strand break mechanisms such as NHEJ or HDR. These mechanisms are described throughout the literature, for example by Davis & Maizels, PNAS, 111(10):E924-932, Mar. 11, 2014 (“Davis”) (describing Alt-HDR); Frit et al. DNA Repair 17(2014) 81-97 (“Frit”) (describing Alt-NHEJ); and Iyama and Wilson III, DNA Repair (Amst.) 2013 Aug. 12(8): 620-636 (“Iyama”) (describing canonical HDR and NHEJ pathways generally).

[0481] Where genome editing systems operate by forming DSBs, such systems optionally include one or more components that promote or facilitate a particular mode of double-strand break repair or a particular repair outcome. For instance, Cotta-Ramusino also describes genome editing systems in which a single stranded oligonucleotide “donor template” is added; the donor template is incorporated into a target region of cellular DNA that is cleaved by the genome editing system, and can result in a change in the target sequence.

[0482] In certain embodiments, genome editing systems modify a target sequence, or modify expression of a target gene in or near the target sequence, without causing single- or double-strand breaks. For example, a genome editing system may include an RNA-guided nuclease fused to a functional domain that acts on DNA, thereby modifying the target sequence or its expression. As one example, an RNA-guided nuclease can be connected to (e.g., fused to) a cytidine deaminase functional domain, and may operate by generating targeted C-to-A substitutions. Exemplary nuclease/deaminase fusions are described in Komor et al. Nature 533, 420-424 (19 May 2016) (“Komor”). Alternatively, a genome editing system may utilize a cleavage-inactivated (i.e., a “dead”) nuclease, such as a dead Cas9 (dCas9), and may operate by forming stable complexes on one or more targeted regions of cellular DNA, thereby interfering with functions involving the targeted region(s) including, without limitation, mRNA transcription, chromatin remodeling, etc.

### Nuclease

[0483] Any nuclease that causes a break within an endogenous genomic sequence, e.g., a coding sequence of an essential gene of the cell can be used in the methods of the present disclosure. In some embodiments the nuclease is a DNA nuclease. In some embodiments the nuclease causes a single-strand break (SSB) within an endogenous coding sequence of an essential gene of the cell, e.g., in a “prime editing” system. In some embodiments the nuclease causes a double-strand break (DSB) within an endogenous coding sequence of an essential gene of the cell. In some embodiments the double-strand break is caused by a single nuclease. In some embodiments the double-strand break is caused by two nucleases that each cause a single-strand break on opposing strands, e.g., a dual “nickase” system. In some embodiments the nuclease is a CRISPR/Cas nuclease and the method further comprises contacting the cell with one or more guide molecules for the CRISPR/Cas nuclease. Exemplary CRISPR/Cas nucleases and guide molecules are described in more detail herein. It is to be understood that the nuclease (including a nickase) is not limited in any manner and can also be a zinc finger nuclease (ZFN), a transcription activator-like effector nuclease (TALEN), a meganuclease, or other nuclease known in the art (or a combination thereof). Methods for designing zinc finger nucleases (ZFNs) are well known in the art, e.g., see Urnov et al., Nature Reviews Genetics 2010; 11:636-640 and Paschon et al., Nat. Commun. 2019; 10(1): 1133 and references cited therein. Methods for designing transcription activator-like effector nucleases (TALENs) are well known in the art, e.g., see Joung and Sander, Nat. Rev. Mol. Cell Biol. 2013; 14(1):49-55 and references cited therein. Methods for designing meganucleases are also well known in the art, e.g., see Silva et al., Curr. Gene Ther. 2011; 11(1): 11-27 and Redel and Prather, Toxicol. Pathol. 2016; 44(3):428-433.

[0484] In some embodiments, a nuclease suitable for methods described herein can have an editing efficiency that is greater than about 50%. In some embodiments, a nuclease suitable for methods described herein can have an editing efficiency that is greater than about 55%. In some embodiments, a nuclease suitable for methods described herein can have an editing efficiency that is greater than about 60%. In some embodiments, a nuclease suitable for methods described herein can have an editing efficiency that is greater than about 65%. In some embodiments, a nuclease suitable for methods described herein can have an editing efficiency that is greater than about 70%. In some embodiments, a nuclease suitable for methods described herein can have an editing efficiency that is greater than about 75%. In some embodiments, a nuclease suitable for methods described herein can have an editing efficiency that is greater than about 80%. In some embodiments, a nuclease suitable for methods described herein can have an editing efficiency that is greater than about 85%. In some embodiments, a nuclease suitable for methods described herein can have an editing efficiency that is greater than about 90%. In some embodiments, a nuclease suitable for methods described herein can have an editing efficiency that is greater than about 95%. In some embodiments, a nuclease suitable for methods described herein can have an editing efficiency that is greater than about 96%. In some embodiments, a nuclease suitable for methods described herein can have an editing efficiency that is greater than about 97%. In some embodiments, a nuclease suitable for methods described herein can have an editing efficiency that is greater than about 98%. In some embodiments, a nuclease suitable for methods described herein can have an editing efficiency that is greater than about 99%.

[0485] In general, the nuclease can be delivered to the cell as a protein or a nucleic acid encoding the protein, e.g., a DNA molecule or mRNA molecule. The protein or nucleic acid can be combined with other delivery agents, e.g., lipids or polymers in a lipid or polymer nanoparticle and targeting agents such as antibodies or other binding agents with specificity for the cell. The DNA molecule can be a nucleic acid vector, such as a viral genome or circular double-stranded DNA, e.g., a plasmid. Nucleic acid vectors encoding a nuclease can include other coding or non-coding elements. For example, a nuclease can be delivered as part of a viral genome (e.g., in an AAV, adenoviral or lentiviral genome) that includes certain genomic backbone elements (e.g., inverted terminal repeats, in the case of an AAV genome).

[0486] A CRISPR/Cas nuclease can be delivered to the cell as a protein or a nucleic acid encoding the protein, e.g., a DNA molecule or mRNA molecule. The guide molecule can be delivered as an RNA molecule or encoded by a DNA molecule. A CRISPR/Cas nuclease can also be delivered with a guide molecule as a ribonucleoprotein (RNP) and introduced into the cell via nucleofection (electroporation).

### CRISPR Cas Nucleases

[0487] CRISPR/Cas nucleases according to the present disclosure include, but are not limited to, naturally-occurring Class 2 CRISPR nucleases such as Cas9, and Cpf1 (Cas12a), as well as other Cas12 nucleases and nucleases derived or obtained therefrom. In functional terms, CRISPR/Cas nucleases are defined as those nucleases that: (a) interact with (e.g., complex with) a gRNA; and (b) together with the gRNA, associate with, and optionally cleave or modify, a target region of a DNA that includes (i) a sequence complementary to the targeting domain of the gRNA and, optionally, (ii) an additional sequence referred to as a “protospacer adjacent motif,” or “PAM,” which is described in greater detail below. As the following examples will illustrate, CRISPR/Cas nucleases can be defined, in broad terms, by their PAM specificity and cleavage activity, even though variations may exist between individual CRISPR/Cas nucleases that share the same PAM specificity or cleavage activity. Skilled artisans will appreciate that some aspects of the present disclosure relate to systems and methods that can be implemented using any suitable CRISPR/Cas nuclease having a certain PAM specificity and/or cleavage activity. For this reason, unless otherwise specified, the term CRISPR/Cas nuclease should be understood as a generic term, and not limited to any particular type (e.g., Cas9 vs. Cpf1), species (e.g., S. pyogenes vs. S, aureus) or variation (e.g., full-length vs. truncated or split; naturally-occurring PAM specificity vs. engineered PAM specificity, etc.) of CRISPR/Cas nuclease.

[0488] The PAM sequence takes its name from its sequential relationship to the “protospacer” sequence that is complementary to gRNA targeting domains (or “spacers”). Together with protospacer sequences, PAM sequences define target regions or sequences for specific CRISPR/Cas nuclease and gRNA combinations.

[0489] Various CRISPR/Cas nucleases may require different sequential relationships between PAMs and protospacers. In general, Cas9s recognize PAM sequences that are 3′ of the protospacer. Cpf1 (Cas12a), on the other hand, generally recognizes PAM sequences that are 5′ of the protospacer.

[0490] In addition to recognizing specific sequential orientations of PAMs and protospacers, CRISPR/Cas nucleases can also recognize specific PAM sequences. S. aureus Cas9, for instance, recognizes a PAM sequence of NNGRRT or NNGRRV, wherein the N residues are immediately 3′ of the region recognized by the gRNA targeting domain. S. pyogenes Cas9 recognizes NGG PAM sequences. F. novicida Cpf1 recognizes a TTN PAM sequence. PAM sequences have been identified for a variety of CRISPR/Cas nucleases, and a strategy for identifying novel PAM sequences has been described by Shmakov et al., Molecular Cell 2015; 60:385-397. It should also be noted that engineered CRISPR/Cas nucleases can have PAM specificities that differ from the PAM specificities of reference molecules (for instance, in the case of an engineered CRISPR/Cas nuclease, the reference molecule may be the naturally occurring variant from which the CRISPR/Cas nuclease is derived, or the naturally occurring variant having the greatest amino acid sequence homology to the engineered CRISPR/Cas nuclease).

[0491] In addition to their PAM specificity, CRISPR/Cas nucleases can be characterized by their DNA cleavage activity: naturally-occurring CRISPR/Cas nucleases typically form double-strand breaks (DSBs) in target nucleic acids, but engineered variants called “nickases” have been produced that generate only single-strand breaks (SSBs), e.g., those discussed in Ran et al., Cell 2013; 154(6):1380-1389 (“Ran”), or that that do not cut at all.

### Cas9

[0492] Crystal structures have been determined for S. pyogenes Cas9 (Jinek et al., Science 2014; 343(6176): 1247997 (“Jinek 2014”), and for S, aureus Cas9 in complex with a unimolecular guide RNA and a target DNA. See Nishimasu et al., Cell 1024; 156:935-949 (“Nishimasu 2014”); Nishimasu et al., Cell 2015; 162:1113-1126 (“Nishimasu 2015”); and Anders et al., Nature 2014; 513(7519):569-73 (“Anders 2014”).

[0493] A naturally occurring Cas9 protein comprises two lobes: a recognition (REC) lobe and a nuclease (NUC) lobe; each of which comprise particular structural and/or functional domains. The REC lobe comprises an arginine-rich bridge helix (BH) domain, and at least one REC domain (e.g., a REC1 domain and, optionally, a REC2 domain). The REC lobe does not share structural similarity with other known proteins, indicating that it is a unique functional domain. While not wishing to be bound by any theory, mutational analyses suggest specific functional roles for the BH and REC domains: the BH domain appears to play a role in gRNA:DNA recognition, while the REC domain is thought to interact with the repeat:anti-repeat duplex of the gRNA and to mediate the formation of the Cas9/gRNA complex.

[0494] The NUC lobe comprises a RuvC domain, an HNH domain, and a PAM-interacting (PI) domain. The RuvC domain shares structural similarity to retroviral integrase superfamily members and cleaves the non-complementary (i.e., bottom) strand of the target nucleic acid. It may be formed from two or more split RuvC motifs (such as RuvC I, RuvCII, and RuvCIII in S. pyogenes and S, aureus). The HNH domain, meanwhile, is structurally similar to HNN endonuclease motifs, and cleaves the complementary (i.e., top) strand of the target nucleic acid. The PI domain, as its name suggests, contributes to PAM specificity.

[0495] While certain functions of Cas9 are linked to (but not necessarily fully determined by) the specific domains set forth above, these and other functions may be mediated or influenced by other Cas9 domains, or by multiple domains on either lobe. For instance, in S. pyogenes Cas9, as described in Nishimasu 2014, the repeat:antirepeat duplex of the gRNA falls into a groove between the REC and NUC lobes, and nucleotides in the duplex interact with amino acids in the BH, PI, and REC domains. Some nucleotides in the first stem loop structure also interact with amino acids in multiple domains (PI, BH and REC1), as do some nucleotides in the second and third stem loops (RuvC and PI domains).

### Cpf1

[0496] The crystal structure of Acidaminococcus sp. Cpf1 in complex with crRNA and a dsDNA target including a TTTN PAM sequence has been solved by Yamano et al., Cell. 2016; 165(4): 949-962 (“Yamano”). Cpf1, like Cas9, has two lobes: a REC (recognition) lobe, and a NUC (nuclease) lobe. The REC lobe includes REC1 and REC2 domains, which lack similarity to any known protein structures. The NUC lobe, meanwhile, includes three RuvC domains (RuvC-I, -II and -III) and a BH domain. However, in contrast to Cas9, the Cpf1 REC lobe lacks an HNH domain, and includes other domains that also lack similarity to known protein structures: a structurally unique PI domain, three Wedge (WED) domains (WED-I, -II and -III), and a nuclease (Nuc) domain.

[0497] While Cas9 and Cpf1 share similarities in structure and function, it should be appreciated that certain Cpf1 activities are mediated by structural domains that are not analogous to any Cas9 domains. For instance, cleavage of the complementary strand of the target DNA appears to be mediated by the Nuc domain, which differs sequentially and spatially from the HNH domain of Cas9. Additionally, the non-targeting portion of Cpf1 gRNA (the handle) adopts a pseudoknot structure, rather than a stem loop structure formed by the repeat:antirepeat duplex in Cas9 gRNAs.

### Nuclease Variants

[0498] The CRISPR/Cas nucleases described herein have activities and properties that can be useful in a variety of applications, but the skilled artisan will appreciate that CRISPR/Cas nucleases can also be modified in certain instances, to alter cleavage activity, PAM specificity, or other structural or functional features.

[0499] Turning first to modifications that alter cleavage activity, mutations that reduce or eliminate the activity of domains within the NUC lobe have been described above. Exemplary mutations that may be made in the RuvC domains, in the Cas9 HNH domain, or in the Cpf1 Nuc domain are described in Ran, Yamano and PCT Publication No. WO 2016/073990A1, the entire contents of each of which are incorporated herein by reference. In general, mutations that reduce or eliminate activity in one of the two nuclease domains result in CRISPR/Cas nucleases with nickase activity, but it should be noted that the type of nickase activity varies depending on which domain is inactivated. As one example, inactivation of a RuvC domain or of a Cas9 HNH domain results in a nickase. Exemplary nickase variants include Cas9 D10A and Cas9 H840A (numbering scheme according to SpCas9 wild-type sequence). Additional suitable nickase variants, including Cas12a variants, will be apparent to the skilled artisan based on the present disclosure and the knowledge in the art. The present disclosure is not limited in this respect. In some embodiments a nickase may be fused to a reverse transcriptase to produce a prime editor (PE), e.g., as described in Anzalone et al., Nature 2019; 576:149-157, the entire contents of which are incorporated herein by reference.

[0500] Modifications of PAM specificity relative to naturally occurring Cas9 reference molecules has been described for both S. pyogenes (Kleinstiver et al., Nature 2015; 523(7561):481-5); and S. aureus (Kleinstiver et al., Nat Biotechnol. 2015; 33(12):1293-1298). Modifications that improve the targeting fidelity of Cas9 have also been described (Kleinstiver et al., Nature 2016; 529:490-495). Each of these references is incorporated by reference herein.

[0501] CRISPR/Cas nucleases have also been split into two or more parts, as described by Zetsche et al., Nat Biotechnol. 2015; 33(2): 139-42, incorporated by reference, and by Fine et al., Sci Rep. 2015; 5:10777, incorporated by reference.

[0502] CRISPR/Cas nucleases can be, in certain embodiments, size-optimized or truncated, for instance via one or more deletions that reduce the size of the nuclease while still retaining gRNA association, target and PAM recognition, and cleavage activities. In certain embodiments, RNA guided nucleases are bound, covalently or non-covalently, to another polypeptide, nucleotide, or other structure, optionally by means of a linker. Exemplary bound nucleases and linkers are described by Guilinger et al., Nature Biotech. 2014; 32:577-582, which is incorporated by reference herein.

[0503] CRISPR/Cas nucleases also optionally include a tag, such as, but not limited to, a nuclear localization signal, to facilitate movement of CRISPR/Cas nuclease protein into the nucleus. In certain embodiments, the CRISPR/Cas nuclease can incorporate C- and/or N-terminal nuclear localization signals. Nuclear localization sequences are known in the art.

[0504] The foregoing list of modifications is intended to be exemplary in nature, and the skilled artisan will appreciate, in view of the instant disclosure, that other modifications may be possible or desirable in certain applications. For brevity, therefore, exemplary systems, methods and compositions of the present disclosure are presented with reference to particular CRISPR/Cas nucleases, but it should be understood that the CRISPR/Cas nucleases used may be modified in ways that do not alter their operating principles. Such modifications are within the scope of the present disclosure.

[0505] Exemplary suitable nuclease variants include, but are not limited to, AsCpf1 (AsCas12a) variants comprising an M537R substitution, an H800A substitution, and/or an F870L substitution, or any combination thereof (numbering scheme according to AsCpf1 wild-type sequence). In some embodiments, a nuclease variant is a Cas12a variant, e.g., a Cas12a variant comprising 1, 2, or 3 of the amino acid substitutions selected from M537R, F870L, and H800A. In some embodiments, a Cas12a variant comprises an amino acid sequence having at least about 90%, 95%, or 100% identity to an AsCpf1 sequence described herein.

[0506] Other suitable modifications of the AsCpf1 amino acid sequence are known to those of ordinary skill in the art. Some exemplary sequences of wild-type AsCpf1 and AsCpf1 variants are provided below:

His-AsCpf1-sNLS-sNLS H800A amino acid sequence
SEQ ID NO: 58
MGHHHHHHGSTQFEGFTNLYQVSKTLRFELIPQGKTLKHIQEQGF
IEEDKARNDHYKELKPIIDRIYKTYADQCLQLVQLDWENLSAAID
SYRKEKTEETRNALIEEQATYRNAIHDYFIGRTDNLTDAINKRHA
EIYKGLFKAELFNGKVLKQLGTVTTTEHENALLRSFDKFTTYFSG
FYENRKNVESAEDISTAIPHRIVQDNFPKFKENCHIFTRLITAVP
SLREHFENVKKAIGIFVSTSIEEVFSFPFYNQLLTQTQIDLYNQL
LGGISREAGTEKIKGLNEVLNLAIQKNDETAHIIASLPHRFIPLF
KQILSDRNTLSFILEEFKSDEEVIQSFCKYKTLLRNENVLETAEA
LFNELNSIDLTHIFISHKKLETISSALCDHWDTLRNALYERRISE
LTGKITKSAKEKVQRSLKHEDINLQEIISAAGKELSEAFKQKTSE
ILSHAHAALDQPLPTTLKKQEEKEILKSQLDSLLGLYHLLDWFAV
DESNEVDPEFSARLTGIKLEMEPSLSFYNKARNYATKKPYSVEKF
KLNFQMPTLASGWDVNKEKNNGAILFVKNGLYYLGIMPKQKGRYK
ALSFEPTEKTSEGEDKMYYDYFPDAAKMIPKCSTQLKAVTAHFQT
HTTPILLSNNFIEPLEITKEIYDLNNPEKEPKKFQTAYAKKTGDQ
KGYREALCKWIDFTRDFLSKYTKTTSIDLSSLRPSSQYKDLGEYY
AELNPLLYHISFQRIAEKEIMDAVETGKLYLFQIYNKDFAKGHHG
KPNLHTLYWTGLFSPENLAKTSIKLNGQAELFYRPKSRMKRMAAR
LGEKMLNKKLKDQKTPIPDTLYQELYDYVNHRLSHDLSDEARALL
PNVITKEVSHEIIKDRRFTSDKFFFHVPITLNYQAANSPSKFNQR
VNAYLKEHPETPIIGIDRGERNLIYITVIDSTGKILEQRSLNTIQ
QFDYQKKLDNREKERVAARQAWSVVGTIKDLKQGYLSQVIHEIVD
LMIHYQAVVVLENLNFGFKSKRTGIAEKAVYQQFEKMLIDKLNCL
VLKDYPAEKVGGVLNPYQLTDQFTSFAKMGTQSGFLFYVPAPYTS
KIDPLTGFVDPFVWKTIKNHESRKHFLEGFDFLHYDVKTGDFILH
FKMNRNLSFQRGLPGEMPAWDIVFEKNETQFDAKGTPFIAGKRIV
PVIENHRFTGRYRDLYPANELIALLEEKGIVERDGSNILPKLLEN
DDSHAIDTMVALIRSVLQMRNSNAATGEDYINSPVRDLNGVCFDS
RFQNPEWPMDADANGAYHIALKGQLLLNHLKESKDLKLQNGISNQ
DWLAYIQELRNGSPKKKRKVGSPKKKRKV
Cpf1 variant 1 amino acid sequence
SEQ ID NO: 59
MTQFEGFTNLYQVSKTLRFELIPQGKTLKHIQEQGFIEEDKARND
HYKELKPIIDRIYKTYADQCLQLVQLDWENLSAAIDSYRKEKTEE
TRNALIEEQATYRNAIHDYFIGRTDNLTDAINKRHAEIYKGLFKA
ELFNGKVLKQLGTVTTTEHENALLRSFDKFTTYFSGFYENRKNVF
SAEDISTAIPHRIVQDNFPKFKENCHIFTRLITAVPSLREHFENV
KKAIGIFVSTSIEEVESFPFYNQLLTQTQIDLYNQLLGGISREAG
TEKIKGLNEVLNLAIQKNDETAHIIASLPHRFIPLFKQILSDRNT
LSFILEEFKSDEEVIQSFCKYKTLLRNENVLETAEALFNELNSID
LTHIFISHKKLETISSALCDHWDTLRNALYERRISELTGKITKSA
KEKVQRSLKHEDINLQEIISAAGKELSEAFKQKTSEILSHAHAAL
DQPLPTTLKKQEEKEILKSQLDSLLGLYHLLDWFAVDESNEVDPE
FSARLTGIKLEMEPSLSFYNKARNYATKKPYSVEKFKLNFQRPTL
ASGWDVNKEKNNGAILFVKNGLYYLGIMPKQKGRYKALSFEPTEK
TSEGFDKMYYDYFPDAAKMIPKCSTQLKAVTAHFQTHTTPILLSN
NFIEPLEITKEIYDLNNPEKEPKKFQTAYAKKTGDQKGYREALCK
WIDFTRDFLSKYTKTTSIDLSSLRPSSQYKDLGEYYAELNPLLYH
ISFQRIAEKEIMDAVETGKLYLFQIYNKDFAKGHHGKPNLHTLYW
TGLFSPENLAKTSIKLNGQAELFYRPKSRMKRMAHRLGEKMLNKK
LKDQKTPIPDTLYQELYDYVNHRLSHDLSDEARALLPNVITKEVS
HEIIKDRRFTSDKFLFHVPITLNYQAANSPSKENQRVNAYLKEHP
ETPIIGIDRGERNLIYITVIDSTGKILEQRSLNTIQQFDYQKKLD
NREKERVAARQAWSVVGTIKDLKQGYLSQVIHEIVDLMIHYQAVV
VLENLNFGFKSKRIGIAEKAVYQQFEKMLIDKLNCLVLKDYPAEK
VGGVLNPYQLTDQFTSFAKMGTQSGFLFYVPAPYTSKIDPLTGFV
DPFVWKTIKNHESRKHFLEGFDFLHYDVKTGDFILHFKMNRNLSF
QRGLPGEMPAWDIVFEKNETQFDAKGTPFIAGKRIVPVIENHRFT
GRYRDLYPANELIALLEEKGIVERDGSNILPKLLENDDSHAIDTM
VALIRSVLQMRNSNAATGEDYINSPVRDLNGVCFDSRFQNPEWPM
DADANGAYHIALKGQLLLNHLKESKDLKLQNGISNQDWLAYIQEL
RNGRSSDDEATADSQHAAPPKKKRKVGGSGGSGGSGGSGGSGGSG
GSGGSLEHHHHHH
Cpf1 variant 2 amino acid sequence
SEQ ID NO: 60
MTQFEGFTNLYQVSKTLRFELIPQGKTLKHIQEQGFIEEDKARND
HYKELKPIIDRIYKTYADQCLQLVQLDWENLSAAIDSYRKEKTEE
TRNALIEEQATYRNAIHDYFIGRTDNLTDAINKRHAEIYKGLFKA
ELFNGKVLKQLGTVTTTEHENALLRSFDKFTTYFSGFYENRKNVE
SAEDISTAIPHRIVQDNFPKFKENCHIFTRLITAVPSLREHFENV
KKAIGIFVSTSIEEVFSFPFYNQLLTQTQIDLYNQLLGGISREAG
TEKIKGLNEVLNLAIQKNDETAHIIASLPHRFIPLFKQILSDRNT
LSFILEEFKSDEEVIQSFCKYKTLLRNENVLETAEALFNELNSID
LTHIFISHKKLETISSALCDHWDTLRNALYERRISELTGKITKSA
KEKVQRSLKHEDINLQEIISAAGKELSEAFKQKTSEILSHAHAAL
DQPLPTTLKKQEEKEILKSQLDSLLGLYHLLDWFAVDESNEVDPE
FSARLTGIKLEMEPSLSFYNKARNYATKKPYSVEKFKLNFQMPTL
ASGWDVNKEKNNGAILFVKNGLYYLGIMPKQKGRYKALSFEPTEK
TSEGFDKMYYDYFPDAAKMIPKCSTQLKAVTAHFQTHTTPILLSN
NFIEPLEITKEIYDLNNPEKEPKKFQTAYAKKTGDQKGYREALCK
WIDFTRDFLSKYTKTTSIDLSSLRPSSQYKDLGEYYAELNPLLYH
ISFQRIAEKEIMDAVETGKLYLFQIYNKDFAKGHHGKPNLHTLYW
TGLESPENLAKTSIKLNGQAELFYRPKSRMKRMAHRLGEKMLNKK
LKDQKTPIPDTLYQELYDYVNHRLSHDLSDEARALLPNVITKEVS
HEIIKDRRFTSDKFFFHVPITLNYQAANSPSKENQRVNAYLKEHP
ETPIIGIDRGERNLIYITVIDSTGKILEQRSLNTIQQFDYQKKLD
NREKERVAARQAWSVVGTIKDLKQGYLSQVIHEIVDLMIHYQAVV
VLENLNFGFKSKRTGIAEKAVYQQFEKMLIDKLNCLVLKDYPAEK
VGGVLNPYQLTDQFTSFAKMGTQSGFLFYVPAPYTSKIDPLTGFV
DPFVWKTIKNHESRKHFLEGFDFLHYDVKTGDFILHFKMNRNLSF
QRGLPGFMPAWDIVFEKNETQFDAKGTPFIAGKRIVPVIENHRFT
GRYRDLYPANELIALLEEKGIVERDGSNILPKLLENDDSHAIDTM
VALIRSVLQMRNSNAATGEDYINSPVRDLNGVCFDSRFQNPEWPM
DADANGAYHIALKGQLLLNHLKESKDLKLQNGISNQDWLAYIQEL
RNGRSSDDEATADSQHAAPPKKKRKVGGSGGSGGSGGSGGSGGSG
GSGGSLEHHHHHH
Cpf1 variant 3 amino acid sequence
SEQ ID NO: 61
MTQFEGFTNLYQVSKTLRFELIPQGKTLKHIQEQGFIEEDKARND
HYKELKPIIDRIYKTYADQCLQLVQLDWENLSAAIDSYRKEKTEE
TRNALIEEQATYRNAIHDYFIGRTDNLTDAINKRHAEIYKGLFKA
ELFNGKVLKQLGTVTTTEHENALLRSFDKFTTYFSGFYENRKNVE
SAEDISTAIPHRIVQDNFPKFKENCHIFTRLITAVPSLREHFENV
KKAIGIFVSTSIEEVFSFPFYNQLLTQTQIDLYNQLLGGISREAG
TEKIKGLNEVLNLAIQKNDETAHIIASLPHRFIPLFKQILSDRNT
LSFILEEFKSDEEVIQSFCKYKTLLRNENVLETAEALFNELNSID
LTHIFISHKKLETISSALCDHWDTLRNALYERRISELTGKITKSA
KEKVQRSLKHEDINLQEIISAAGKELSEAFKQKTSEILSHAHAAL
DQPLPTTLKKQEEKEILKSQLDSLLGLYHLLDWFAVDESNEVDPE
FSARLTGIKLEMEPSLSFYNKARNYATKKPYSVEKFKLNFQRPTL
ASGWDVNKEKNNGAILFVKNGLYYLGIMPKQKGRYKALSFEPTEK
TSEGFDKMYYDYFPDAAKMIPKCSTQLKAVTAHFQTHTTPILLSN
NFIEPLEITKEIYDLNNPEKEPKKFQTAYAKKTGDQKGYREALCK
WIDFTRDELSKYTKTTSIDLSSLRPSSQYKDLGEYYAELNPLLYH
ISFQRIAEKEIMDAVETGKLYLFQIYNKDFAKGHHGKPNLHTLYW
TGLESPENLAKTSIKLNGQAELFYRPKSRMKRMAARLGEKMLNKK
LKDQKTPIPDTLYQELYDYVNHRLSHDLSDEARALLPNVITKEVS
HEIIKDRRFTSDKELFHVPITLNYQAANSPSKENQRVNAYLKEHP
ETPIIGIDRGERNLIYITVIDSTGKILEQRSLNTIQQFDYQKKLD
NREKERVAARQAWSVVGTIKDLKQGYLSQVIHEIVDLMIHYQAVV
VLENLNFGFKSKRTGIAEKAVYQQFEKMLIDKLNCLVLKDYPAEK
VGGVLNPYQLTDQFTSFAKMGTQSGFLFYVPAPYTSKIDPLTGFV
DPFVWKTIKNHESRKHFLEGFDFLHYDVKTGDFILHFKMNRNLSF
QRGLPGEMPAWDIVFEKNETQFDAKGTPFIAGKRIVPVIENHRFT
GRYRDLYPANELIALLEEKGIVERDGSNILPKLLENDDSHAIDTM
VALIRSVLQMRNSNAATGEDYINSPVRDLNGVCFDSRFQNPEWPM
DADANGAYHIALKGQLLLNHLKESKDLKLQNGISNQDWLAYIQEL
RNGRSSDDEATADSQHAAPPKKKRKVGGSGGSGGSGGSGGSGGSG
GSGGSLEHHHHHH
Cpf1 variant 4 amino acid sequence
SEQ ID NO: 62
MTQFEGFTNLYQVSKTLRFELIPQGKTLKHIQEQGFIEEDKARND
HYKELKPIIDRIYKTYADQCLQLVQLDWENLSAAIDSYRKEKTEE
TRNALIEEQATYRNAIHDYFIGRTDNLTDAINKRHAEIYKGLFKA
ELFNGKVLKQLGTVTTTEHENALLRSFDKFTTYFSGFYENRKNVF
SAEDISTAIPHRIVQDNFPKFKENCHIFTRLITAVPSLREHFENV
KKAIGIFVSTSIEEVESFPFYNQLLTQTQIDLYNQLLGGISREAG
TEKIKGLNEVLNLAIQKNDETAHIIASLPHRFIPLFKQILSDRNT
LSFILEEFKSDEEVIQSFCKYKTLLRNENVLETAEALFNELNSID
LTHIFISHKKLETISSALCDHWDTLRNALYERRISELTGKITKSA
KEKVQRSLKHEDINLQEIISAAGKELSEAFKQKTSEILSHAHAAL
DQPLPTTLKKQEEKEILKSQLDSLLGLYHLLDWFAVDESNEVDPE
FSARLTGIKLEMEPSLSFYNKARNYATKKPYSVEKFKLNFQRPTL
ASGWDVNKEKNNGAILFVKNGLYYLGIMPKQKGRYKALSFEPTEK
TSEGFDKMYYDYFPDAAKMIPKCSTQLKAVTAHFQTHTTPILLSN
NFIEPLEITKEIYDLNNPEKEPKKFQTAYAKKTGDQKGYREALCK
WIDFTRDFLSKYTKTTSIDLSSLRPSSQYKDLGEYYAELNPLLYH
ISFQRIAEKEIMDAVETGKLYLFQIYNKDFAKGHHGKPNLHTLYW
TGLFSPENLAKTSIKLNGQAELFYRPKSRMKRMAARLGEKMLNKK
LKDQKTPIPDTLYQELYDYVNHRLSHDLSDEARALLPNVITKEVS
HEIIKDRRFTSDKFLFHVPITLNYQAANSPSKENQRVNAYLKEHP
ETPIIGIDRGERNLIYITVIDSTGKILEQRSLNTIQQFDYQKKLD
NREKERVAARQAWSVVGTIKDLKQGYLSQVIHEIVDLMIHYQAVV
VLENLNFGFKSKRTGIAEKAVYQQFEKMLIDKLNCLVLKDYPAEK
VGGVLNPYQLTDQFTSFAKMGTQSGFLFYVPAPYTSKIDPLIGFV
DPFVWKTIKNHESRKHFLEGFDFLHYDVKTGDFILHFKMNRNLSF
QRGLPGEMPAWDIVFEKNETQFDAKGTPFIAGKRIVPVIENHRFT
GRYRDLYPANELIALLEEKGIVERDGSNILPKLLENDDSHAIDTM
VALIRSVLQMRNSNAATGEDYINSPVRDLNGVCFDSRFQNPEWPM
DADANGAYHIALKGQLLLNHLKESKDLKLQNGISNQDWLAYIQEL
RNGRSSDDEATADSQHAAPPKKKRKV
Cpf1 variant 5 amino acid sequence
SEQ ID NO: 63
MTQFEGFTNLYQVSKTLRFELIPQGKTLKHIQEQGFIEEDKARND
HYKELKPIIDRIYKTYADQCLQLVQLDWENLSAAIDSYRKEKTEE
TRNALIEEQATYRNAIHDYFIGRTDNLTDAINKRHAEIYKGLFKA
ELFNGKVLKQLGTVTTTEHENALLRSFDKFTTYFSGFYENRKNVE
SAEDISTAIPHRIVQDNFPKFKENCHIFTRLITAVPSLREHFENV
KKAIGIFVSTSIEEVESFPFYNQLLTQTQIDLYNQLLGGISREAG
TEKIKGLNEVLNLAIQKNDETAHIIASLPHRFIPLFKQILSDRNT
LSFILEEFKSDEEVIQSFCKYKTLLRNENVLETAEALFNELNSID
LTHIFISHKKLETISSALCDHWDTLRNALYERRISELTGKITKSA
KEKVQRSLKHEDINLQEIISAAGKELSEAFKQKTSEILSHAHAAL
DQPLPTTLKKQEEKEILKSQLDSLLGLYHLLDWFAVDESNEVDPE
FSARLTGIKLEMEPSLSFYNKARNYATKKPYSVEKFKLNFQRPTL
ASGWDVNKEKNNGAILFVKNGLYYLGIMPKQKGRYKALSFEPTEK
TSEGFDKMYYDYFPDAAKMIPKCSTQLKAVTAHFQTHTTPILLSN
NFIEPLEITKEIYDLNNPEKEPKKFQTAYAKKTGDQKGYREALCK
WIDFTRDELSKYTKTTSIDLSSLRPSSQYKDLGEYYAELNPLLYH
ISFQRIAEKEIMDAVETGKLYLFQIYNKDFAKGHHGKPNLHTLYW
TGLFSPENLAKTSIKLNGQAELFYRPKSRMKRMAHRLGEKMLNKK
LKDQKTPIPDTLYQELYDYVNHRLSHDLSDEARALLPNVITKEVS
HEIIKDRRFTSDKFLFHVPITLNYQAANSPSKFNQRVNAYLKEHP
ETPIIGIDRGERNLIYITVIDSTGKILEQRSLNTIQQFDYQKKLD
NREKERVAARQAWSVVGTIKDLKQGYLSQVIHEIVDLMIHYQAVV
VLENLNFGFKSKRTGIAEKAVYQQFEKMLIDKLNCLVLKDYPAEK
VGGVLNPYQLTDQFTSFAKMGTQSGFLFYVPAPYTSKIDPLTGFV
DPFVWKTIKNHESRKHFLEGFDFLHYDVKTGDFILHFKMNRNLSF
QRGLPGFMPAWDIVFEKNETQFDAKGTPFIAGKRIVPVIENHRFT
GRYRDLYPANELIALLEEKGIVERDGSNILPKLLENDDSHAIDTM
VALIRSVLQMRNSNAATGEDYINSPVRDLNGVCFDSRFQNPEWPM
DADANGAYHIALKGQLLLNHLKESKDLKLQNGISNQDWLAYIQEL
RNGRSSDDEATADSQHAAPPKKKRKV
Cpf1 variant 6 amino acid sequence
SEQ ID NO: 64
MTQFEGFTNLYQVSKTLRFELIPQGKTLKHIQEQGFIEEDKARND
HYKELKPIIDRIYKTYADQCLQLVQLDWENLSAAIDSYRKEKTEE
TRNALIEEQATYRNAIHDYFIGRTDNLTDAINKRHAEIYKGLFKA
ELFNGKVLKQLGTVTTTEHENALLRSFDKFTTYFSGFYENRKNVF
SAEDISTAIPHRIVQDNFPKFKENCHIFTRLITAVPSLREHFENV
KKAIGIFVSTSIEEVFSFPFYNQLLTQTQIDLYNQLLGGISREAG
TEKIKGLNEVLNLAIQKNDETAHIIASLPHRFIPLFKQILSDRNT
LSFILEEFKSDEEVIQSFCKYKILLRNENVLETAEALFNELNSID
LTHIFISHKKLETISSALCDHWDTLRNALYERRISELTGKITKSA
KEKVQRSLKHEDINLQEIISAAGKELSEAFKQKTSEILSHAHAAL
DQPLPTTLKKQEEKEILKSQLDSLLGLYHLLDWFAVDESNEVDPE
FSARLTGIKLEMEPSLSFYNKARNYATKKPYSVEKFKLNFQRPTL
ASGWDVNKEKNNGAILFVKNGLYYLGIMPKQKGRYKALSFEPTEK
TSEGFDKMYYDYFPDAAKMIPKCSTQLKAVTAHFQTHTTPILLSN
NFIEPLEITKEIYDLNNPEKEPKKFQTAYAKKTGDQKGYREALCK
WIDFTRDFLSKYTKTTSIDLSSLRPSSQYKDLGEYYAELNPLLYH
ISFQRIAEKEIMDAVETGKLYLFQIYNKDFAKGHHGKPNLHTLYW
TGLESPENLAKTSIKLNGQAELFYRPKSRMKRMAHRLGEKMLNKK
LKDQKTPIPDTLYQELYDYVNHRLSHDLSDEARALLPNVITKEVS
HEIIKDRRFTSDKELFHVPITLNYQAANSPSKENQRVNAYLKEHP
ETPIIGIDRGERNLIYITVIDSTGKILEQRSLNTIQQFDYQKKLD
NREKERVAARQAWSVVGTIKDLKQGYLSQVIHEIVDLMIHYQAVV
VLENLNFGFKSKRTGIAEKAVYQQFEKMLIDKLNCLVLKDYPAEK
VGGVLNPYQLTDQFTSFAKMGTQSGFLFYVPAPYTSKIDPLTGFV
DPFVWKTIKNHESRKHFLEGFDFLHYDVKTGDFILHFKMNRNLSF
QRGLPGEMPAWDIVFEKNETQFDAKGTPFIAGKRIVPVIENHRFT
GRYRDLYPANELIALLEEKGIVERDGSNILPKLLENDDSHAIDTM
VALIRSVLQMRNSNAATGEDYINSPVRDLNGVCFDSRFQNPEWPM
DADANGAYHIALKGQLLLNHLKESKDLKLQNGISNQDWLAYIQEL
RNGRSSDDEATADSQHAAPPKKKRKVGGSGGSGGSGGSGGSGGSG
GSGGSLEHHHHHH
Cpf1 variant 7 amino acid sequence
SEQ ID NO: 65
MGRDPGKPIPNPLLGLDSTAPKKKRKVGIHGVPAATQFEGFTNLY
QVSKTLRFELIPQGKTLKHIQEQGFIEEDKARNDHYKELKPIIDR
IYKTYADQCLQLVQLDWENLSAAIDSYRKEKTEETRNALIEEQAT
YRNAIHDYFIGRTDNLTDAINKRHAEIYKGLFKAELFNGKVLKQL
GTVTTTEHENALLRSFDKFTTYFSGFYENRKNVESAEDISTAIPH
RIVQDNFPKFKENCHIFTRLITAVPSLREHFENVKKAIGIFVSTS
IEEVFSFPFYNQLLTQTQIDLYNQLLGGISREAGTEKIKGLNEVL
NLAIQKNDETAHIIASLPHRFIPLFKQILSDRNTLSFILEEFKSD
EEVIQSFCKYKTLLRNENVLETAEALFNELNSIDLTHIFISHKKL
ETISSALCDHWDTLRNALYERRISELTGKITKSAKEKVQRSLKHE
DINLQEIISAAGKELSEAFKQKTSEILSHAHAALDQPLPTTLKKQ
EEKEILKSQLDSLLGLYHLLDWFAVDESNEVDPEFSARLTGIKLE
MEPSLSFYNKARNYATKKPYSVEKFKLNFQMPTLASGWDVNKEKN
NGAILFVKNGLYYLGIMPKQKGRYKALSFEPTEKTSEGFDKMYYD
YFPDAAKMIPKCSTQLKAVTAHFQTHTTPILLSNNFIEPLEITKE
IYDLNNPEKEPKKFQTAYAKKTGDQKGYREALCKWIDFTRDFLSK
YTKTTSIDLSSLRPSSQYKDLGEYYAELNPLLYHISFQRIAEKEI
MDAVETGKLYLFQIYNKDFAKGHHGKPNLHTLYWTGLESPENLAK
TSIKLNGQAELFYRPKSRMKRMAHRLGEKMLNKKLKDQKTPIPDT
LYQELYDYVNHRLSHDLSDEARALLPNVITKEVSHEIIKDRRFTS
DKFFFHVPITLNYQAANSPSKFNQRVNAYLKEHPETPIIGIDRGE
RNLIYITVIDSTGKILEQRSLNTIQQFDYQKKLDNREKERVAARQ
AWSVVGTIKDLKQGYLSQVIHEIVDLMIHYQAVVVLENLNFGFKS
KRTGIAEKAVYQQFEKMLIDKLNCLVLKDYPAEKVGGVLNPYQLT
DQFTSFAKMGTQSGFLFYVPAPYTSKIDPLTGFVDPFVWKTIKNH
ESRKHFLEGFDFLHYDVKTGDFILHFKMNRNLSFQRGLPGFMPAW
DIVFEKNETQFDAKGTPFIAGKRIVPVIENHRFTGRYRDLYPANE
LIALLEEKGIVERDGSNILPKLLENDDSHAIDTMVALIRSVLQMR
NSNAATGEDYINSPVRDLNGVCFDSRFQNPEWPMDADANGAYHIA
LKGQLLLNHLKESKDLKLQNGISNQDWLAYIQELRNPKKKRKVKL
AAALEHHHHHH
Exemplary AsCpf1 wild-type amino acid sequence
SEQ ID NQ: 66
MTQFEGFTNLYQVSKTLRFELIPQGKTLKHIQEQGFIEEDKARND
HYKELKPIIDRIYKTYADQCLQLVQLDWENLSAAIDSYRKEKTEE
TRNALIEEQATYRNAIHDYFIGRTDNLTDAINKRHAEIYKGLFKA
ELFNGKVLKQLGTVTTTEHENALLRSFDKFTTYFSGFYENRKNVE
SAEDISTAIPHRIVQDNFPKFKENCHIFTRLITAVPSLREHFENV
KKAIGIFVSTSIEEVESFPFYNQLLTQTQIDLYNQLLGGISREAG
TEKIKGLNEVLNLAIQKNDETAHIIASLPHRFIPLFKQILSDRNT
LSFILEEFKSDEEVIQSFCKYKTLLRNENVLETAEALFNELNSID
LTHIFISHKKLETISSALCDHWDTLRNALYERRISELTGKITKSA
KEKVQRSLKHEDINLQEIISAAGKELSEAFKQKTSEILSHAHAAL
DQPLPTTLKKQEEKEILKSQLDSLLGLYHLLDWFAVDESNEVDPE
FSARLTGIKLEMEPSLSFYNKARNYATKKPYSVEKFKLNFQMPTL
ASGWDVNKEKNNGAILFVKNGLYYLGIMPKQKGRYKALSFEPTEK
TSEGFDKMYYDYFPDAAKMIPKCSTQLKAVTAHFQTHTTPILLSN
NFIEPLEITKEIYDLNNPEKEPKKFQTAYAKKTGDQKGYREALCK
WIDFTRDELSKYTKTTSIDLSSLRPSSQYKDLGEYYAELNPLLYH
ISFQRIAEKEIMDAVETGKLYLFQIYNKDFAKGHHGKPNLHTLYW
TGLFSPENLAKTSIKLNGQAELFYRPKSRMKRMAHRLGEKMLNKK
LKDQKTPIPDTLYQELYDYVNHRLSHDLSDEARALLPNVITKEVS
HEIIKDRRFTSDKFFFHVPITLNYQAANSPSKENQRVNAYLKEHP
ETPIIGIDRGERNLIYITVIDSTGKILEQRSLNTIQQFDYQKKLD
NREKERVAARQAWSVVGTIKDLKQGYLSQVIHEIVDLMIHYQAVV
VLENLNFGFKSKRIGIAEKAVYQQFEKMLIDKLNCLVLKDYPAEK
VGGVLNPYQLTDQFTSFAKMGTQSGFLFYVPAPYTSKIDPLTGFV
DPFVWKTIKNHESRKHFLEGFDFLHYDVKTGDFILHFKMNRNLSF
QRGLPGEMPAWDIVFEKNETQFDAKGTPFIAGKRIVPVIENHRFT
GRYRDLYPANELIALLEEKGIVERDGSNILPKLLENDDSHAIDTM
VALIRSVLQMRNSNAATGEDYINSPVRDLNGVCFDSRFQNPEWPM
DADANGAYHIALKGQLLLNHLKESKDLKLQNGISNQDWLAYIQEL
RN

[0507] Additional suitable nucleases and nuclease variants will be apparent to the skilled artisan based on the present disclosure in view of the knowledge in the art. Exemplary suitable nucleases may include but are not limited to those provided in Table 5

TABLE 5
Exemplary Suitable CRISPR/Cas Nucleases

| | Length | | |
|---|---|---|---|
| Nuclease | (A.A.) | PAM | Reference |
| SpCas9 | 1368 | NGG | Cong et al., Science 2013; |
| | | | 339(6121): 819-23 |
| SaCas9 | 1053 | NNGRRT | Ran et al., Nature 2015; |
| | | | 520(7546): 186-91. |
| (KKH) | 1067 | NNNRRT | Kleinstiver et al., |
| SaCas9 | | | Nat Biotechnol. 2015; |
| | | | 33(12): 1293-1298 |
| AsCpf1 | 1353 | TTTV | Zetsche et al., Nat Biotechnol. |
| (AsCas12a) | | | 2017; 35(1): 31-34 |
| LbCpf1 | 1274 | TTTV | Zetsche et al., Cell 2015; |
| (LbCas12a) | | | 163(3): 759-71. |
| CasX | 980 | TTC | Burstein et al., Nature 2017; |
| | | | 542(7640): 237-241. |
| CasY | 1200 | TA | Burstein et al., Nature 2017; |
| | | | 542(7640): 237-241. |
| Cas12h1 | 870 | RTR | Yan et al., Science 2019; |
| | | | 363(6422): 88-91. |
| Cas12i1 | 1093 | TTN | Yan et al., Science 2019; |
| | | | 363(6422): 88-91. |
| Cas12c1 | unknown | TG | Yan et al., Science 2019; |
| | | | 363(6422): 88-91. |
| Cas12c2 | unknown | TN | Yan et al., Science 2019; |
| | | | 363(6422): 88-91. |
| eSpCas9 | 1423 | NGG | Chen et al., Nature 2017; |
| | | | 550(7676): 407-410. |
| Cas9-HF1 | 1367 | NGG | Chen et al., Nature 2017; |
| | | | 550(7676): 407-410. |
| HypaCas9 | 1404 | NGG | Chen et al., Nature 2017; |
| | | | 550(7676): 407-410. |
| dCas9-Fokl | 1623 | NGG | U.S. Pat. No. 9,322,037 |
| Sniper-Cas9 | 1389 | NGG | Lee et al., Nat Commun. |
| | | | 2018; 9(1): 3048. |
| xCas9 | 1786 | NGG, NG, | Hu et al., Nature. 2018 |
| | | GAA, GAT | Apr. 5; 556(7699): 57-63. |
| AaCas12b | 1129 | TTN | Teng et al., Cell Discov. |
| | | | 2018; 4: 63. |
| evoCas9 | 1423 | NGG | Casini et al., Nat Biotechnol. |
| | | | 2018; 36(3): 265-271. |
| SpCas9-NG | 1423 | NG | Nishimasu et al., Science |
| | | | 2018; 361(6408): 1259-1262. |
| VRQR | 1368 | NGA | Li et al., The CRISPR |
| | | | Journal, 2018; 01: 01 |
| VRER | 1372 | NGCG | Kleinstiver et al., Nature |
| | | | 2016; 529(7587): 490-5. |
| NmeCas9 | 1082 | NNNNGATT | Amrani et al., Genome Biol. |
| | | | 2018; 19(1): 214. |
| CjCas9 | 984 | NNNNRYAC | Kim et al., Nat Commun. |
| | | | 2017; 8: 14500. |
| BhCas12b | 1108 | ATTN | Strecker et al., Nat Commun. |
| | | | 2019; 10(1): 212. |
| BhCas12b V4 | 1108 | ATTN | Pausch et al., Science 2020; |
| | | | 369(6501): 333-337. |
| CasΦ | 700-800 | TBN (where | Pausch et al., Science 2020; |
| | | B is G, T, or | 369(6501): 333-337. |
| | | C) | |

Guide RNA (gRNA) Molecules

[0508] Guide RNAs (gRNAs) of the present disclosure may be unimolecular (comprising a single RNA molecule, and referred to alternatively as chimeric), or modular (comprising more than one, and typically two, separate RNA molecules, such as a crRNA and a tracrRNA, which are usually associated with one another, for instance by duplexing). gRNAs and their component parts are described throughout the literature, for instance in Briner et al., Molecular Cell 2014; 56(2): 333-339 (“Briner”), and in PCT Publication No. WO2016/073990A1.

[0509] In bacteria and archaea, type II CRISPR systems generally comprise an CRISPR/Cas nuclease protein such as Cas9, a CRISPR RNA (crRNA) that includes a 5′ region that is complementary to a foreign sequence, and a trans-activating crRNA (tracrRNA) that includes a 5′ region that is complementary to, and forms a duplex with, a 3′ region of the crRNA. While not intending to be bound by any theory, it is thought that this duplex facilitates the formation of—and is necessary for the activity of—the Cas9/gRNA complex. As type II CRISPR systems were adapted for use in gene editing, it was discovered that the crRNA and tracrRNA could be joined into a single unimolecular or chimeric guide RNA, in one non-limiting example, by means of a four nucleotide (e.g., GAAA) “tetraloop” or “linker” sequence bridging complementary regions of the crRNA (at its 3′ end) and the tracrRNA (at its 5′ end). See Mali et al., Science 2013; 339(6121):823-826 (“Mali”); Jiang et al., Nat Biotechnol. 2013; 31(3):233-239 (“Jiang”); and Jinek et al., Science 2012; 337(6096):816-821 (“Jinek 2012”).

[0510] Guide RNAs, whether unimolecular or modular, include a “targeting domain” that is fully or partially complementary to a target domain within a target sequence, such as a DNA sequence in the genome of a cell where editing is desired. Targeting domains are referred to by various names in the literature, including without limitation “guide sequences” (Hsu et al., Nat Biotechnol. 2013; 31(9):827-832, (“Hsu”)), “complementarity regions” (PCT Publication No. WO2016/073990A1), “spacers” (Briner) and generically as “crRNAs” (Jiang). Irrespective of the names they are given, targeting domains are typically 10-30 nucleotides in length, and in certain embodiments are 16-24 nucleotides in length (for instance, 16, 17, 18, 19, 20, 21, 22, 23 or 24 nucleotides in length), and are at or near the 5′ terminus of in the case of a Cas9 gRNA, and at or near the 3′ terminus in the case of a Cpf1 gRNA.

[0511] In addition to the targeting domains, gRNAs typically (but not necessarily, as discussed below) include a plurality of domains that may influence the formation or activity of gRNA/Cas9 complexes. For instance, as mentioned above, the duplexed structure formed by first and secondary complementarity domains of a gRNA (also referred to as a repeat:anti-repeat duplex) interacts with the recognition (REC) lobe of Cas9 and can mediate the formation of Cas9/gRNA complexes. See Nishimasu 2014 and 2015. It should be noted that the first and/or second complementarity domains may contain one or more poly-A tracts, which can be recognized by RNA polymerases as a termination signal. The sequence of the first and second complementarity domains are, therefore, optionally modified to eliminate these tracts and promote the complete in vitro transcription of gRNAs, for instance through the use of A-G swaps as described in Briner, or A-U swaps. These and other similar modifications to the first and second complementarity domains are within the scope of the present disclosure.

[0512] Along with the first and second complementarity domains, Cas9 gRNAs typically include two or more additional duplexed regions that are involved in nuclease activity in vivo but not necessarily in vitro. See Nishimasu 2015. A first stem-loop one near the 3′ portion of the second complementarity domain is referred to variously as the “proximal domain,” (PCT Publication No. WO2016/073990A1) “stem loop 1” (Nishimasu 2014 and 2015) and the “nexus” (Briner). One or more additional stem loop structures are generally present near the 3′ end of the gRNA, with the number varying by species: S. pyogenes gRNAs typically include two 3′ stem loops (for a total of four stem loop structures including the repeat:anti-repeat duplex), while S. aureus and other species have only one (for a total of three stem loop structures). A description of conserved stem loop structures (and gRNA structures more generally) organized by species is provided in Briner.

[0513] While the foregoing description has focused on gRNAs for use with Cas9, it should be appreciated that other CRISPR/Cas nucleases have been (or may in the future be) discovered or invented which utilize gRNAs that differ in some ways from those described to this point. For instance, Cpf1 (“CRISPR from Prevotella and Franciscella 1”) which is also called Cas12a is a CRISPR/Cas nuclease that does not require a tracrRNA to function (see Zetsche et al., Cell 2015; 163:759-771 (“Zetsche I”)). A gRNA for use in a Cpf1 genome editing system generally includes a targeting domain and a complementarity domain (alternately referred to as a “handle”). It should also be noted that, in gRNAs for use with Cpf1, the targeting domain is usually present at or near the 3′ end, rather than the 5′ end as described above in connection with Cas9 gRNAs (the handle is at or near the 5′ end of a Cpf1 gRNA).

[0514] Those of skill in the art will appreciate, however, that although structural differences may exist between gRNAs from different prokaryotic species, or between Cpf1 and Cas9 gRNAs, the principles by which gRNAs operate are generally consistent. Because of this consistency of operation, gRNAs can be defined, in broad terms, by their targeting domain sequences, and skilled artisans will appreciate that a given targeting domain sequence can be incorporated in any suitable gRNA, including a unimolecular or chimeric gRNA, or a gRNA that includes one or more chemical modifications and/or sequential modifications (substitutions, additional nucleotides, truncations, etc.). Thus, for economy of presentation in this disclosure, gRNAs may be described solely in terms of their targeting domain sequences.

[0515] More generally, skilled artisans will appreciate that some aspects of the present disclosure relate to systems, methods and compositions that can be implemented using multiple CRISPR/Cas nucleases. For this reason, unless otherwise specified, the term gRNA should be understood to encompass any suitable gRNA that can be used with any CRISPR/Cas nuclease, and not only those gRNAs that are compatible with a particular species of Cas9 or Cpf1. By way of illustration, the term gRNA can, in certain embodiments, include a gRNA for use with any CRISPR/Cas nuclease occurring in a Class 2 CRISPR system, such as a type II or type V or CRISPR system, or an CRISPR/Cas nuclease derived or adapted therefrom.

[0516] In some embodiments a method or system of the present disclosure may use more than one gRNA. In some embodiments, two or more gRNAs may be used to create two or more double strand breaks in the genome of a cell. In some embodiments, a multiplexed editing strategy may be used that targets two or more essential genes at the same time with two or more knock-in cassettes. In some such embodiments, the two or more knock-in cassettes may comprise different exogenous cargo sequences, e.g., different knock-in cassettes may encode different gene products of interest and thus the edited cells will express a plurality of gene products of interest from different knock-in cassettes targeted to different loci.

[0517] In some embodiments using more than one gRNA, a double-strand break may be caused by a dual-gRNA paired “nickase” strategy. In some embodiments for selecting gRNAs, including the determination for which gRNAs can be used for the dual-gRNA paired “nickase” strategy, gRNA pairs should be oriented on the DNA such that PAMs are facing out and cutting with the D10A Cas9 nickase will result in 5′ overhangs.

[0518] In some embodiments, a method or system of the present disclosure may use a prime editing gRNA (pegRNA) in conjunction with a prime editor (PE). As is well known in the art, a pegRNA is substantially larger than standard gRNAs, e.g., in some embodiments longer than 50, 100, 150 or 250 nucleotides, e.g., as described in Anzalone et al., Nature 2019; 576:149-157, the entire contents of which are incorporated herein by reference. The pegRNA is a gRNA with a primer binding sequence (PBS) and a donor template containing the desired RNA sequence added at one of the termini, e.g., the 3′ end. The PE:pegRNA complex binds to the target DNA, and the nickase domain of the prime editor nicks only one strand, generating a flap. The PBS, located on the pegRNA, binds to the DNA flap and the edited RNA sequence is reverse transcribed using the reverse transcriptase domain of the prime editor. The edited strand is incorporated into the DNA at the end of the nicked flap, and the target DNA is repaired with the new reverse transcribed DNA. The original DNA segment is removed by a cellular endonuclease. This leaves one strand edited, and one strand unedited. In the newest PE systems, e.g., PE3 and PE3b, the unedited strand can be corrected to match the newly edited strand by using an additional standard gRNA. In this case, the unedited strand is nicked by a nickase and the newly edited strand is used as a template to repair the nick, thus completing the edit.

gRNA Design

[0519] Methods for selection and validation of target sequences as well as off-target analyses have been described previously, e.g., in Mali; Hsu; Fu et al., Nat Biotechnol 2014; 32(3):279-84, Heigwer et al., Nat methods 2014; 11(2):122-3; Bae et al., Bioinformatics 2014; 30(10): 1473-5; and Xiao et al. Bioinformatics 2014; 30(8):1180-1182. As a non-limiting example, gRNA design may involve the use of a software tool to optimize the choice of potential target sequences corresponding to a user's target sequence, e.g., to minimize total off-target activity across the genome. While off-target activity is not limited to cleavage, the cleavage efficiency at each off-target sequence can be predicted, e.g., using an experimentally-derived weighting scheme. These and other guide selection methods are described in detail in PCT Publication No. WO2016/073990A1.

[0520] For example, methods for selection and validation of target sequences as well as off-target analyses can be performed using cas-offinder (Bae et al., Bioinformatics 2014; 30:1473-5). Cas-offinder is a tool that can quickly identify all sequences in a genome that have up to a specified number of mismatches to a guide sequence.

[0521] As another example, methods for scoring how likely a given sequence is to be an off-target (e.g., once candidate target sequences are identified) can be performed. An exemplary score includes a Cutting Frequency Determination (CFD) score, as described by Doench et al., Nat Biotechnol. 2016; 34:184-91.

gRNA Modifications

[0522] In certain embodiments, gRNAs as used herein may be modified or unmodified gRNAs. In certain embodiments, a gRNA may include one or more modifications. In certain embodiments, the one or more modifications may include a phosphorothioate linkage modification, a phosphorodithioate (PS2) linkage modification, a 2′-O-methyl modification, or combinations thereof. In certain embodiments, the one or more modifications may be at the 5′ end of the gRNA, at the 3′ end of the gRNA, or combinations thereof.

[0523] In certain embodiments, a gRNA modification may comprise one or more phosphorodithioate (PS2) linkage modifications.

[0524] In some embodiments, a gRNA used herein includes one or more or a stretch of deoxyribonucleic acid (DNA) bases, also referred to herein as a “DNA extension.” In some embodiments, a gRNA used herein includes a DNA extension at the 5′ end of the gRNA, the 3′ end of the gRNA, or a combination thereof. In certain embodiments, the DNA extension may be 1, 2, 3, 4, 5, 6, 7, 8, 9, 10, 11, 12, 13, 14, 15, 16, 17, 18, 19, 20, 21, 22, 23, 24, 25, 26, 27, 28, 29, 30, 31, 32, 33, 34, 35, 36, 37, 38, 39, 40, 41, 42, 43, 44, 45, 46, 47, 48, 49, 50, 51, 52, 53, 54, 55, 56, 57, 58, 59, 60, 61, 62, 63, 64, 65, 66, 67, 68, 69, 70, 71, 72, 73, 74, 75, 76, 77, 78, 79, 80, 81, 82, 83, 84, 85, 86, 87, 88, 89, 90, 91, 92, 93, 94, 95, 96, 97, 98, 99, or 100 DNA bases long. For example, in certain embodiments, the DNA extension may be 1, 2, 3, 4, 5, 10, 15, 20, or 25 DNA bases long. In certain embodiments, the DNA extension may include one or more DNA bases selected from adenine (A), guanine (G), cytosine (C), or thymine (T). In certain embodiments, the DNA extension includes the same DNA bases. For example, the DNA extension may include a stretch of adenine (A) bases. In certain embodiments, the DNA extension may include a stretch of thymine (T) bases. In certain embodiments, the DNA extension includes a combination of different DNA bases.

[0525] Exemplary suitable 5′ extensions for Cpf1 guide RNAs are provided in Table 6 below:

TABLE 6
Exemplary Cpf1 gRNA 5′ Extensions

| | | 5′ |
|---|---|---|
| SEQ ID NO: | 5′ extension sequence | modification |
| N/A | rCrUrUrUrU | +5 RNA |
| 67 | rArArGrArCrCrUrUrUrU | +10 RNA |
| 68 | rArUrGrUrGrUrUrUrUrUrGrUrCrArArArArGrArCr | +25 RNA |
| | CrUrUrUrU | |
| 69 | rArGrGrCrCrArGrCrUrUrGrCrCrGrGrUrUrUrUrUr | +60 RNA |
| | UrArGrUrCrGrUrGrCrUrGrCrUrUrCrArUrGrUrGr | |
| | UrUrUrUrUrGrUrCrArArArArGrArCrCrUrUrUrU | |
| N/A | CTTTT | +5 DNA |
| 70 | AAGACCTTTT | +10 DNA |
| 71 | ATGTGTTTTTGTCAAAAGACCTTTT | +25 DNA |
| 72 | AGGCCAGCTTGCCGGTTTTTTAGTCGTGCTGC | +60 DNA |
| | TTCATGTGTTTTTGTCAAAAGACCTTTT | |
| 73 | TTTTTGTCAAAAGACCTTTT | +20 DNA |
| 74 | GCTTCATGTGTTTTTGTCAAAAGACCTTTT | +30 DNA |
| 75 | GCCGGTTTTTTAGTCGTGCTGCTTCATGTGTT | +50 DNA |
| | TTTGTCAAAAGACCTTTT | |
| 76 | TAGTCGTGCTGCTTCATGTGTTTTTGTCAAAA | +40 DNA |
| | GACCTTTT | |
| 77 | C*C*GAAGTTTTCTTCGGTTTT | +20 DNA + |
| | | 2xPS |
| 78 | T*T*TTTCCGAAGTTTTCTTCGGTTTT | +25 DNA + |
| | | 2xPS |
| 79 | A*A*CGCTTTTTCCGAAGTTTTCTTCGGTTTT | +30 DNA + |
| | | 2xPS |
| 80 | G*C*GTTGTTTTCAACGCTTTTTCCGAAGTTTT | +41 DNA + |
| | CTTCGGTTTT | 2xPS |
| 81 | G*G*CTTCTTTTGAAGCCTTTTTGCGTTGTTTT | +62 DNA + |
| | CAACGCTTTTTCCGAAGTTTTCTTCGGTTTT | 2xPS |
| 82 | A*T*GTGTTTTTGTCAAAAGACCTTTT | +25 DNA + |
| | | 2xPS |
| 83 | AAAAAAAAAAAAAAAAAAAAAAAAA | +25 A |
| 84 | TTTTTTTTTTTTTTTTTTTTTTTTT | +25 T |
| 85 | mA*mU*rGrUrGrUrUrUrUrUrGrUrCrArArArArGr | +25 RNA + |
| | ArCrCrUrUrUrU | 2xPS |
| 86 | mA*mA*rArArArArArArArArArArArArArArArAr | PolyA RNA |
| | ArArArArArArA | + 2xPS |
| 87 | mU*mU*rUrUrUrUrUrUrUrUrUrUrUrUrUrUrUrUr | PolyU RNA |
| | UrUrUrUrUrUrU | + 2xPS |

[0526] In certain embodiments, a gRNA used herein includes a DNA extension as well as a chemical modification, e.g., one or more phosphorothioate linkage modifications, one or more phosphorodithioate (PS2) linkage modifications, one or more 2′-O-methyl modifications, or one or more additional suitable chemical gRNA modification disclosed herein, or combinations thereof. In certain embodiments, the one or more modifications may be at the 5′ end of the gRNA, at the 3′ end of the gRNA, or combinations thereof.

[0527] Without wishing to be bound by theory, it is contemplated that any DNA extension may be used with any gRNA disclosed herein, so long as it does not hybridize to the target nucleic acid being targeted by the gRNA and it also exhibits an increase in editing at the target nucleic acid site relative to a gRNA which does not include such a DNA extension.

[0528] In some embodiments, a gRNA used herein includes one or more or a stretch of ribonucleic acid (RNA) bases, also referred to herein as an “RNA extension.” In some embodiments, a gRNA used herein includes an RNA extension at the 5′ end of the gRNA, the 3′ end of the gRNA, or a combination thereof. In certain embodiments, the RNA extension may be 1, 2, 3, 4, 5, 6, 7, 8, 9, 10, 11, 12, 13, 14, 15, 16, 17, 18, 19, 20, 21, 22, 23, 24, 25, 26, 27, 28, 29, 30, 31, 32, 33, 34, 35, 36, 37, 38, 39, 40, 41, 42, 43, 44, 45, 46, 47, 48, 49, 50, 51, 52, 53, 54, 55, 56, 57, 58, 59, 60, 61, 62, 63, 64, 65, 66, 67, 68, 69, 70, 71, 72, 73, 74, 75, 76, 77, 78, 79, 80, 81, 82, 83, 84, 85, 86, 87, 88, 89, 90, 91, 92, 93, 94, 95, 96, 97, 98, 99, or 100 RNA bases long. For example, in certain embodiments, the RNA extension may be 1, 2, 3, 4, 5, 10, 15, 20, or 25 RNA bases long. In certain embodiments, the RNA extension may include one or more RNA bases selected from adenine (rA), guanine (rG), cytosine (rC), or uracil (rU), in which the “r” represents RNA, 2′-hydroxy. In certain embodiments, the RNA extension includes the same RNA bases. For example, the RNA extension may include a stretch of adenine (rA) bases. In certain embodiments, the RNA extension includes a combination of different RNA bases. In certain embodiments, a gRNA used herein includes an RNA extension as well as one or more phosphorothioate linkage modifications, one or more phosphorodithioate (PS2) linkage modifications, one or more 2′-O-methyl modifications, one or more additional suitable gRNA modification, e.g., chemical modification, disclosed herein, or combinations thereof. In certain embodiments, the one or more modifications may be at the 5′ end of the gRNA, at the 3′ end of the gRNA, or combinations thereof. In certain embodiments, a gRNA including a RNA extension may comprise a sequence set forth herein.

[0529] It is contemplated that gRNAs used herein may also include an RNA extension and a DNA extension. In certain embodiments, the RNA extension and DNA extension may both be at the 5′ end of the gRNA, the 3′ end of the gRNA, or a combination thereof. In certain embodiments, the RNA extension is at the 5′ end of the gRNA and the DNA extension is at the 3′ end of the gRNA. In certain embodiments, the RNA extension is at the 3′ end of the gRNA and the DNA extension is at the 5′ end of the gRNA.

[0530] In some embodiments, a gRNA which includes a modification, e.g., a DNA extension at the 5′ end and/or a chemical modification as disclosed herein, is complexed with a CRISPR/Cas nuclease, e.g., an AsCpf1 nuclease, to form an RNP, which is then employed to edit a target cell, e.g., a pluripotent stem cell or a progeny thereof.

[0531] Certain exemplary modifications discussed in this section can be included at any position within a gRNA sequence including, without limitation at or near the 5′ end (e.g., within 1-10, 1-5, or 1-2 nucleotides of the 5′ end) and/or at or near the 3′ end (e.g., within 1-10, 1-5, or 1-2 nucleotides of the 3′ end). In some cases, modifications are positioned within functional motifs, such as the repeat-anti-repeat duplex of a Cas9 gRNA, a stem loop structure of a Cas9 or Cpf1 gRNA, and/or a targeting domain of a gRNA.

[0532] As one example, the 5′ end of a gRNA can include a eukaryotic mRNA cap structure or cap analog (e.g., a G(5′)ppp(5′)G cap analog, a m7G(5′)ppp(5′)G cap analog, or a 3′-O-Me-m7G(5′)ppp(5′)G anti reverse cap analog (ARCA)), as shown below:

[chemical structure]

[0533] The cap or cap analog can be included during either chemical or enzymatic synthesis of the gRNA.

[0534] Along similar lines, the 5′ end of the gRNA can lack a 5′ triphosphate group. For instance, in vitro transcribed gRNAs can be phosphatase-treated (e.g., using calf intestinal alkaline phosphatase) to remove a 5′ triphosphate group.

[0535] Another common modification involves the addition, at the 3′ end of a gRNA, of a plurality (e.g., 1-10, 10-20, or 25-200) of adenine (A) residues referred to as a polyA tract. The polyA tract can be added to a gRNA during chemical or enzymatic synthesis, using a polyadenosine polymerase (e.g., E. coli Poly(A)Polymerase).

[0536] Guide RNAs can be modified at a 3′ terminal U ribose. For example, the two terminal hydroxyl groups of the U ribose can be oxidized to aldehyde groups and a concomitant opening of the ribose ring to afford a modified nucleoside as shown below:

[chemical structure]

wherein “U” can be an unmodified or modified uridine.

[0537] The 3′ terminal U ribose can be modified with a 2′3′ cyclic phosphate as shown below:

[chemical structure]

wherein “U” can be an unmodified or modified uridine.

[0538] Guide RNAs can contain 3′ nucleotides that can be stabilized against degradation, e.g., by incorporating one or more of the modified nucleotides described herein. In certain embodiments, uridines can be replaced with modified uridines, e.g., 5-(2-amino)propyl uridine, and 5-bromo uridine, or with any of the modified uridines described herein; adenosines and guanosines can be replaced with modified adenosines and guanosines, e.g., with modifications at the 8-position, e.g., 8-bromo guanosine, or with any of the modified adenosines or guanosines described herein.

[0539] In certain embodiments, sugar-modified ribonucleotides can be incorporated into a gRNA, e.g., wherein the 2′ OH-group is replaced by a group selected from H, —OR, —R (wherein R can be, e.g., alkyl, cycloalkyl, aryl, aralkyl, heteroaryl or sugar), halo, —SH, —SR (wherein R can be, e.g., alkyl, cycloalkyl, aryl, aralkyl, heteroaryl or sugar), amino (wherein amino can be, e.g., NH₂, alkylamino, dialkylamino, heterocyclyl, arylamino, diarylamino, heteroarylamino, diheteroarylamino, or amino acid); or cyano (—CN). In certain embodiments, the phosphate backbone can be modified as described herein, e.g., with a phosphothioate (PhTx) group. In certain embodiments, one or more of the nucleotides of the gRNA can each independently be a modified or unmodified nucleotide including, but not limited to 2′-sugar modified, such as, 2′-O-methyl, 2′-O-methoxyethyl, or 2′-Fluoro modified including, e.g., 2′-F or 2′-O-methyl, adenosine (A), 2′-F or 2′-O-methyl, cytidine (C), 2′-F or 2′-O-methyl, uridine (U), 2′-F or 2′-O-methyl, thymidine (T), 2′-F or 2′-O-methyl, guanosine (G), 2′-O-methoxyethyl-5-methyluridine (Teo), 2′-O-methoxyethyladenosine (Aeo), 2′-O-methoxyethyl-5-methylcytidine (m5Ceo), and any combinations thereof.

[0540] Guide RNAs can also include “locked” nucleic acids (LNA) in which the 2′ OH-group can be connected, e.g., by a C1-6 alkylene or C1-6 heteroalkylene bridge, to the 4′ carbon of the same ribose sugar. Any suitable moiety can be used to provide such bridges, including without limitation methylene, propylene, ether, or amino bridges; O-amino (wherein amino can be, e.g., NH₂, alkylamino, dialkylamino, heterocyclyl, arylamino, diarylamino, heteroarylamino, or diheteroarylamino, ethylenediamine, or polyamino) and aminoalkoxy or O(CH₂)ₙ-amino (wherein amino can be, e.g., NH₂, alkylamino, dialkylamino, heterocyclyl, arylamino, diarylamino, heteroarylamino, or diheteroarylamino, ethylenediamine, or polyamino).

[0541] In certain embodiments, a gRNA can include a modified nucleotide which is multicyclic (e.g., tricyclo; and “unlocked” forms, such as glycol nucleic acid (GNA) (e.g., R-GNA or S-GNA, where ribose is replaced by glycol units attached to phosphodiester bonds), or threose nucleic acid (TNA, where ribose is replaced with α-L-threofuranosyl-(3′→2′)).

[0542] Generally, gRNAs include the sugar group ribose, which is a 5-membered ring having an oxygen. Exemplary modified gRNAs can include, without limitation, replacement of the oxygen in ribose (e.g., with sulfur (S), selenium (Se), or alkylene, such as, e.g., methylene or ethylene); addition of a double bond (e.g., to replace ribose with cyclopentenyl or cyclohexenyl); ring contraction of ribose (e.g., to form a 4-membered ring of cyclobutane or oxetane); ring expansion of ribose (e.g., to form a 6- or 7-membered ring having an additional carbon or heteroatom, such as for example, anhydrohexitol, altritol, mannitol, cyclohexanyl, cyclohexenyl, and morpholino that also has a phosphoramidate backbone). Although the majority of sugar analog alterations are localized to the 2′ position, other sites are amenable to modification, including the 4′ position. In certain embodiments, a gRNA comprises a 4′-S, 4′-Se or a 4′-C-aminomethyl-2′-O-Me modification.

[0543] In certain embodiments, deaza nucleotides, e.g., 7-deaza-adenosine, can be incorporated into a gRNA. In certain embodiments, O- and N-alkylated nucleotides, e.g., N6-methyl adenosine, can be incorporated into a gRNA. In certain embodiments, one or more or all of the nucleotides in a gRNA are deoxynucleotides.

[0544] Guide RNAs can also include one or more cross-links between complementary regions of the crRNA (at its 3′ end) and the tracrRNA (at its 5′ end) (e.g., within a “tetraloop” structure and/or positioned in any stem loop structure occurring within a gRNA). A variety of linkers are suitable for use. For example, guide RNAs can include common linking moieties including, without limitation, polyvinylether, polyethylene, polypropylene, polyethylene glycol (PEG), polyvinyl alcohol (PVA), polyglycolide (PGA), polylactide (PLA), polycaprolactone (PCL), and copolymers thereof.

[0545] In some embodiments, a bifunctional cross-linker is used to link a 5′ end of a first gRNA fragment and a 3′ end of a second gRNA fragment, and the 3′ or 5′ ends of the gRNA fragments to be linked are modified with functional groups that react with the reactive groups of the cross-linker. In general, these modifications comprise one or more of amine, sulfhydryl, carboxyl, hydroxyl, alkene (e.g., a terminal alkene), azide and/or another suitable functional group. Multifunctional (e.g. bifunctional) cross-linkers are also generally known in the art, and may be either heterofunctional or homofunctional, and may include any suitable functional group, including without limitation isothiocyanate, isocyanate, acyl azide, an NHS ester, sulfonyl chloride, tosyl ester, tresyl ester, aldehyde, amine, epoxide, carbonate (e.g., Bis(p-nitrophenyl) carbonate), aryl halide, alkyl halide, imido ester, carboxylate, alkyl phosphate, anhydride, fluorophenyl ester, HOBt ester, hydroxymethyl phosphine, O-methylisourea, DSC, NHS carbamate, glutaraldehyde, activated double bond, cyclic hemiacetal, NHS carbonate, imidazole carbamate, acyl imidazole, methylpyridinium ether, azlactone, cyanate ester, cyclic imidocarbonate, chlorotriazine, dehydroazepine, 6-sulfo-cytosine derivatives, maleimide, aziridine, TNB thiol, Ellman's reagent, peroxide, vinylsulfone, phenylthioester, diazoalkanes, diazoacetyl, epoxide, diazonium, benzophenone, anthraquinone, diazo derivatives, diazirine derivatives, psoralen derivatives, alkene, phenyl boronic acid, etc. In some embodiments, a first gRNA fragment comprises a first reactive group and the second gRNA fragment comprises a second reactive group. For example, the first and second reactive groups can each comprise an amine moiety, which are crosslinked with a carbonate-containing bifunctional crosslinking reagent to form a urea linkage. In other instances, (a) the first reactive group comprises a bromoacetyl moiety and the second reactive group comprises a sulfhydryl moiety, or (b) the first reactive group comprises a sulfhydryl moiety and the second reactive group comprises a bromoacetyl moiety, which are crosslinked by reacting the bromoacetyl moiety with the sulfhydryl moiety to form a bromoacetyl-thiol linkage. These and other cross-linking chemistries are known in the art, and are summarized in the literature, including by Greg T. Hermanson, Bioconjugate Techniques, 3rd Ed. 2013, published by Academic Press.

[0546] Additional suitable gRNA modifications will be apparent to those of ordinary skill in the art based on the present disclosure. Suitable gRNA modifications include, for example, those described in PCT Publication No. WO2019070762A1 entitled “MODIFIED CPF1 GUIDE RNA;” in PCT Publication No. WO2016089433A1 entitled “GUIDE RNA WITH CHEMICAL MODIFICATIONS;” in PCT Publication No. WO2016164356A1 entitled “CHEMICALLY MODIFIED GUIDE RNAS FOR CRISPR/CAS-MEDIATED GENE REGULATION;” and in PCT Publication No. WO2017053729A1 entitled “NUCLEASE-MEDIATED GENOME EDITING OF PRIMARY CELLS AND ENRICHMENT THEREOF;” the entire contents of each of which are incorporated herein by reference.

Exemplary gRNAs

[0547] Non-limiting examples of guide RNAs suitable for certain embodiments embraced by the present disclosure are provided herein, for example, in the Tables below. Those of ordinary skill in the art will be able to envision suitable guide RNA sequences for a specific nuclease, e.g., a Cas9 or Cpf1 nuclease, from the disclosure of the targeting domain sequence, either as a DNA or RNA sequence. For example, a guide RNA comprising a targeting sequence consisting of RNA nucleotides would include the RNA sequence corresponding to the targeting domain sequence provided as a DNA sequence, and this contain uracil instead of thymidine nucleotides. For example, a guide RNA comprising a targeting domain sequence consisting of RNA nucleotides, and described by the DNA sequence TCTGCAGAAATGTTCCCCGT (SEQ ID NO: 88) would have a targeting domain of the corresponding RNA sequence UCUGCAGAAAUGUUCCCCGU (SEQ ID NO: 89). As will be apparent to the skilled artisan, such a targeting sequence would be linked to a suitable guide RNA scaffold, e.g., a crRNA scaffold sequence or a chimeric crRNA/tracrRNA scaffold sequence. Suitable gRNA scaffold sequences are known to those of ordinary skill in the art. For AsCpf1, for example, a suitable scaffold sequence comprises the sequence UAAUUUCUACUCUUGUAGAU (SEQ ID NO: 90), added to the 5′-terminus of the targeting domain. In the example above, this would result in a Cpf1 guide RNA of the sequence UAAUUUCUACUCUUGUAGAUUCUGCAGAAAUGUUCCCCGU (SEQ ID NO: 91). Those of skill in the art would further understand how to modify such a guide RNA, e.g., by adding a DNA extension (e.g., in the example above, adding a 25-mer DNA extension as described herein would result, for example, in a guide RNA of the sequence ATGTGTTTTTGTCAAAAGACCTTTTrUrArArUrUrUrCrUrArCrUrCrUrUrGrUrArGrArUrUr CrUrGrCrArGrArArArUrGrUrUrCrCrCrCrGrU (SEQ ID NO: 92)). It will be understood that the exemplary targeting sequences provided herein are not limiting, and additional suitable sequences, e.g., variants of the specific sequences disclosed herein, will be apparent to the skilled artisan based on the present disclosure in view of the general knowledge in the art.

[0548] In some embodiments the gRNA for use in the disclosure is a gRNA targeting TGFβRII (TGFβRII gRNA). In some embodiments, the gRNA targeting TGFβRII is one or more of the gRNAs described in Table 7.

TABLE 7
Exemplary TGFβRII gRNAs

| | gRNA Targeting | | | SEQ |
|---|---|---|---|---|
| | Domain | | | ID |
| Name | Sequence (DNA) | Length | Enzyme | NO: |
| TGFBR24326 | CAGGACGATGTGCAGCGGCC | 20 | AsCpf1 RR | 29 |
| TGFBR24327 | ACCGCACGTTCAGAAGTCGG | 20 | AsCpf1 RR | 30 |
| TGFBR24328 | ACAACTGTGTAAATTTTGTG | 20 | AsCpf1 RR | 31 |
| TGFBR24329 | CAACTGTGTAAATTTTGTGA | 20 | AsCpf1 RR | 32 |
| TGFBR24330 | ACCTGTGACAACCAGAAATC | 20 | AsCpf1 RR | 33 |
| TGFBR24331 | CCTGTGACAACCAGAAATCC | 20 | AsCpf1 RR | 34 |
| TGFBR24332 | TGTGGCTTCTCACAGATGGA | 20 | AsCpf1 RR | 35 |
| TGFBR24333 | TCTGTGAGAAGCCACAGGAA | 20 | AsCpf1 RR | 36 |
| TGFBR24334 | AAGCTCCCCTACCATGACTT | 20 | AsCpf1 RR | 37 |
| TGFBR24335 | GAATAAAGTCATGGTAGGGG | 20 | AsCpf1 RR | 38 |
| TGFBR24336 | AGAATAAAGTCATGGTAGGG | 20 | AsCpf1 RR | 39 |
| TGFBR24337 | CTACCATGACTTTATTCTGG | 20 | AsCpf1 RR | 40 |
| TGFBR24338 | TACCATGACTTTATTCTGGA | 20 | AsCpf1 RR | 41 |
| TGFBR24339 | TAATGCACTTTGGAGAAGCA | 20 | AsCpf1 RR | 42 |
| TGFBR24340 | TTCATAATGCACTTTGGAGA | 20 | AsCpf1 RR | 43 |
| TGFBR24341 | AAGTGCATTATGAAGGAAAA | 20 | AsCpf1 RR | 44 |
| TGFBR24342 | TGTGTTCCTGTAGCTCTGAT | 20 | AsCpf1 RR | 45 |
| TGFBR24343 | TGTAGCTCTGATGAGTGCAA | 20 | AsCpf1 RR | 46 |
| TGFBR24344 | AGTGACAGGCATCAGCCTCC | 20 | AsCpf1 RR | 47 |
| TGFBR24345 | AGTGGTGGCAGGAGGCTGAT | 20 | AsCpf1 RR | 48 |
| TGFBR24346 | AGGTTGAACTCAGCTTCTGC | 20 | AsCpf1 RR | 49 |
| TGFBR24347 | CAGGTTGAACTCAGCTTCTG | 20 | AsCpf1 RR | 50 |
| TGFBR24348 | ACCTGGGAAACCGGCAAGAC | 20 | AsCpf1 RR | 51 |
| TGFBR24349 | CGTCTTGCCGGTTTCCCAGG | 20 | AsCpf1 RR | 52 |
| TGFBR24350 | GCGTCTTGCCGGTTTCCCAG | 20 | AsCpf1 RR | 53 |
| TGFBR24351 | TGAGCTTCCGCGTCTTGCCG | 20 | AsCpf1 RR | 54 |
| TGFBR24352 | GCGAGCACTGTGCCATCATC | 20 | AsCpf1 RR | 55 |
| TGFBR24353 | GGATGATGGCACAGTGCTCG | 20 | AsCpf1 RR | 56 |
| TGFBR24354 | AGGATGATGGCACAGTGCTC | 20 | AsCpf1 RR | 57 |
| TGFBR24355 | CGTGTGCCAACAACATCAAC | 20 | AsCpf1 RR | 58 |
| TGFBR24356 | GCTCAATGGGCAGCAGCTCT | 20 | AsCpf1 RR | 59 |
| TGFBR24357 | ACCAGGGTGTCCAGCTCAAT | 20 | AsCpf1 RR | 60 |
| TGFBR24358 | CACCAGGGTGTCCAGCTCAA | 20 | AsCpf1 RR | 61 |
| TGFBR24359 | CCACCAGGGTGTCCAGCTCA | 20 | AsCpf1 RR | 62 |
| TGFBR24360 | GCTTGGCCTTATAGACCTCA | 20 | AsCpf1 RR | 63 |
| TGFBR24361 | GAGCAGTTTGAGACAGTGGC | 20 | AsCpf1 RR | 64 |
| TGFBR24362 | AGAGGCATACTCCTCATAGG | 20 | AsCpf1 RR | 65 |
| TGFBR24363 | CTATGAGGAGTATGCCTCTT | 20 | AsCpf1 RR | 66 |
| TGFBR24364 | AAGAGGCATACTCCTCATAG | 20 | AsCpf1 RR | 67 |
| TGFBR24365 | TATGAGGAGTATGCCTCTTG | 20 | AsCpf1 RR | 68 |
| TGFBR24366 | GATTGATGTCTGAGAAGATG | 20 | AsCpf1 RR | 69 |
| TGFBR24367 | CTCCTCAGCCGTCAGGAACT | 20 | AsCpf1 RR | 70 |
| TGFBR24368 | GTTCCTGACGGCTGAGGAGC | 20 | AsCpf1 RR | 71 |
| TGFBR24369 | GCTCCTCAGCCGTCAGGAAC | 20 | AsCpf1 RR | 72 |
| TGFBR24370 | TGACGGCTGAGGAGCGGAAG | 20 | AsCpf1 RR | 73 |
| TGFBR24371 | TCTTCCGCTCCTCAGCCGTC | 20 | AsCpf1 RR | 74 |
| TGFBR24372 | AACTCCGTCTTCCGCTCCTC | 20 | AsCpf1 RR | 75 |
| TGFBR24373 | CAACTCCGTCTTCCGCTCCT | 20 | AsCpf1 RR | 76 |
| TGFBR24374 | CCAACTCCGTCTTCCGCTCC | 20 | AsCpf1 RR | 77 |
| TGFBR24375 | ACGCCAAGGGCAACCTACAG | 20 | AsCpf1 RR | 78 |
| TGFBR24376 | CGCCAAGGGCAACCTACAGG | 20 | AsCpf1 RR | 79 |
| TGFBR24377 | AGCTGATGACATGCCGCGTC | 20 | AsCpf1 RR | 80 |
| TGFBR24378 | GGGCGAGGGAGCTGCCCAGC | 20 | AsCpf1 RR | 81 |
| TGFBR24379 | CGGGCGAGGGAGCTGCCCAG | 20 | AsCpf1 RR | 82 |
| TGFBR24380 | CCGGGCGAGGGAGCTGCCCA | 20 | AsCpf1 RR | 83 |
| TGFBR24381 | TCGCCCGGGGGATTGCTCAC | 20 | AsCpf1 RR | 84 |
| TGFBR24382 | ACATGGAGTGTGATCACTGT | 20 | AsCpf1 RR | 85 |
| TGFBR24383 | CAGTGATCACACTCCATGTG | 20 | AsCpf1 RR | 86 |
| TGFBR24384 | TGTGGGAGGCCCAAGATGCC | 20 | AsCpf1 RR | 87 |
| TGFBR24385 | TGTGCACGATGGGCATCTTG | 20 | AsCpf1 RR | 88 |
| TGFBR24386 | CGAGGATATTGGAGCTCTTG | 20 | AsCpf1 RR | 89 |
| TGFBR24387 | ATATCCTCGTGAAGAACGAC | 20 | AsCpf1 RR | 90 |
| TGFBR24388 | GACGCAGGGAAAGCCCAAAG | 20 | AsCpf1 RR | 91 |
| TGFBR24389 | CTGCGTCTGGACCCTACTCT | 20 | AsCpf1 RR | 92 |
| TGFBR24390 | TGCGTCTGGACCCTACTCTG | 20 | AsCpf1 RR | 93 |
| TGFBR24391 | CAGACAGAGTAGGGTCCAGA | 20 | AsCpf1 RR | 94 |
| TGFBR24392 | GCCAGCACGATCCCACCGCA | 20 | AsCpf1 RVR | 95 |
| TGFBR24393 | AAGGAAAAAAAAAAGCCTGG | 20 | AsCpf1 RVR | 96 |
| TGFBR24394 | ACACCAGCAATCCTGACTTG | 20 | AsCpf1 RVR | 97 |
| TGFBR24395 | ACTAGCAACAAGTCAGGATT | 20 | AsCpf1 RVR | 98 |
| TGFBR24396 | GCAACTCCCAGTGGTGGCAG | 20 | AsCpf1 RVR | 99 |
| TGFBR24397 | TGTCATCATCATCTTCTACT | 20 | AsCpf1 RVR | 100 |
| TGFBR24398 | GACCTCAGCAAAGCGACCTT | 20 | AsCpf1 RVR | 101 |
| TGFBR24399 | AGGCCAAGCTGAAGCAGAAC | 20 | AsCpf1 RVR | 102 |
| TGFBR24400 | AGGAGTATGCCTCTTGGAAG | 20 | AsCpf1 RVR | 103 |
| TGFBR24401 | CCTCTTGGAAGACAGAGAAG | 20 | AsCpf1 RVR | 104 |
| TGFBR24402 | TTCTCATGCTTCAGATTGAT | 20 | AsCpf1 RVR | 105 |
| TGFBR24403 | CTCGTGAAGAACGACCTAAC | 20 | AsCpf1 RVR | 106 |
| TGFbR2036 | GGCCGCTGCACATCGTCCTG | 20 | SpyCas9 | 107 |
| TGFbR2037 | GCGGGGTCTGCCATGGGTCG | 20 | SpyCas9 | 108 |
| TGFbR2038 | AGTTGCTCATGCAGGATTTC | 20 | SpyCas9 | 109 |
| TGFbR2039 | CCAGAATAAAGTCATGGTAG | 20 | SpyCas9 | 110 |
| TGFbR2040 | CCCCTACCATGACTTTATTC | 20 | SpyCas9 | 111 |
| TGFbR2041 | AAGTCATGGTAGGGGAGCTT | 20 | SpyCas9 | 112 |
| TGFbR2042 | AGTCATGGTAGGGGAGCTTG | 20 | SpyCas9 | 113 |
| TGFbR2043 | ATTGCACTCATCAGAGCTAC | 20 | SpyCas9 | 114 |
| TGFbR2044 | CCTAGAGTGAAGAGATTCAT | 20 | SpyCas9 | 115 |
| TGFbR2045 | CCAATGAATCTCTTCACTCT | 20 | SpyCas9 | 116 |
| TGFbR2046 | AAAGTCATGGTAGGGGAGCT | 20 | SpyCas9 | 117 |
| TGFbR2047 | GTGAGCAATCCCCCGGGCGA | 20 | SpyCas9 | 118 |
| TGFbR2048 | GTCGTTCTTCACGAGGATAT | 20 | SpyCas9 | 119 |
| TGFbR2049 | GCCGCGTCAGGTACTCCTGT | 20 | SpyCas9 | 120 |
| TGFbR2050 | GACGCGGCATGTCATCAGCT | 20 | SpyCas9 | 121 |
| TGFbR2051 | GCTTCTGCTGCCGGTTAACG | 20 | SpyCas9 | 122 |
| TGFbR2052 | GTGGATGACCTGGCTAACAG | 20 | SpyCas9 | 123 |
| TGFbR2053 | GTGATCACACTCCATGTGGG | 20 | SpyCas9 | 124 |
| TGFbR2054 | GCCCATTGAGCTGGACACCC | 20 | SpyCas9 | 125 |
| TGFbR2055 | GCGGTCATCTTCCAGGATGA | 20 | SpyCas9 | 126 |
| TGFbR2056 | GGGAGCTGCCCAGCTTGCGC | 20 | SpyCas9 | 127 |
| TGFbR2057 | GTTGATGTTGTTGGCACACG | 20 | SpyCas9 | 128 |
| TGFbR2058 | GGCATCTTGGGCCTCCCACA | 20 | SpyCas9 | 129 |
| TGFbR2059 | GCGGCATGTCATCAGCTGGG | 20 | SpyCas9 | 130 |
| TGFbR2060 | GCTCCTCAGCCGTCAGGAAC | 20 | SpyCas9 | 131 |
| TGFbR2061 | GCTGGTGTTATATTCTGATG | 20 | SpyCas9 | 132 |
| TGFbR2062 | CCGACTTCTGAACGTGCGGT | 20 | SpyCas9 | 133 |
| TGFbR2063 | TGCTGGCGATACGCGTCCAC | 20 | SpyCas9 | 134 |
| TGFbR2064 | CCCGACTTCTGAACGTGCGG | 20 | SpyCas9 | 135 |
| TGFbR2065 | CCACCGCACGTTCAGAAGTC | 20 | SpyCas9 | 136 |
| TGFbR2066 | TCACCCGACTTCTGAACGTG | 20 | SpyCas9 | 137 |
| TGFbR2067 | CCCACCGCACGTTCAGAAGT | 20 | SpyCas9 | 138 |
| TGFbR2068 | CGAGCAGCGGGGTCTGCCAT | 20 | SpyCas9 | 139 |
| TGFbR2069 | ACGAGCAGCGGGGTCTGCCA | 20 | SpyCas9 | 140 |
| TGFbR2070 | AGCGGGGTCTGCCATGGGTC | 20 | SpyCas9 | 141 |
| TGFbR2071 | CCTGAGCAGCCCCCGACCCA | 20 | SpyCas9 | 142 |
| TGFbR2072 | CCATGGGTCGGGGGCTGCTC | 20 | SpyCas9 | 143 |
| TGFbR2073 | AACGTGCGGTGGGATCGTGC | 20 | SpyCas9 | 144 |
| TGFbR2074 | GGACGATGTGCAGCGGCCAC | 20 | SpyCas9 | 145 |
| TGFbR2075 | GTCCACAGGACGATGTGCAG | 20 | SpyCas9 | 146 |
| TGFbR2076 | CATGGGTCGGGGGCTGCTCA | 20 | SpyCas9 | 147 |
| TGFbR2077 | CAGCGGGGTCTGCCATGGGT | 20 | SpyCas9 | 148 |
| TGFbR2078 | ATGGGTCGGGGGCTGCTCAG | 20 | SpyCas9 | 149 |
| TGFbR2079 | CGGGGTCTGCCATGGGTCGG | 20 | SpyCas9 | 150 |
| TGFbR2080 | AGGAAGTCTGTGTGGCTGTA | 20 | SpyCas9 | 151 |
| TGFbR2081 | CTCCATCTGTGAGAAGCCAC | 20 | SpyCas9 | 152 |
| TGFbR2082 | ATGATAGTCACTGACAACAA | 20 | SpyCas9 | 153 |
| TGFbR2083 | GATGCTGCAGTTGCTCATGC | 20 | SpyCas9 | 154 |
| TGFbR2084 | ACAGCCACACAGACTTCCTG | 20 | SpyCas9 | 155 |
| TGFbR2085 | GAAGCCACAGGAAGTCTGTG | 20 | SpyCas9 | 156 |
| TGFbR2086 | TTCCTGTGGCTTCTCACAGA | 20 | SpyCas9 | 157 |
| TGFbR2087 | CTGTGGCTTCTCACAGATGG | 20 | SpyCas9 | 158 |
| TGFbR2088 | TCACAAAATTTACACAGTTG | 20 | SpyCas9 | 159 |
| TGFbR2089 | GACAACATCATCTTCTCAGA | 20 | SpyCas9 | 160 |
| TGFbR2090 | TCCAGAATAAAGTCATGGTA | 20 | SpyCas9 | 161 |
| TGFbR2091 | GGTAGGGGAGCTTGGGGTCA | 20 | SpyCas9 | 162 |
| TGFbR2092 | TTCTCCAAAGTGCATTATGA | 20 | SpyCas9 | 163 |
| TGFbR2093 | CATCTTCCAGAATAAAGTCA | 20 | SpyCas9 | 164 |
| TGFbR2094 | CACATGAAGAAAGTCTCACC | 20 | SpyCas9 | 165 |
| TGFbR2095 | TTCCAGAATAAAGTCATGGT | 20 | SpyCas9 | 166 |
| TGFbR2096 | TTTTCCTTCATAATGCACTT | 20 | SpyCas9 | 167 |
| TGFBR24024 | CACAGTTGTGGAAACTTGAC | 20 | AsCpf1 | 168 |
| TGFBR24039 | CCCAACTCCGTCTTCCGCTC | 20 | AsCpf1 | 169 |
| TGFBR24040 | GGCTTTCCCTGCGTCTGGAC | 20 | AsCpf1 | 170 |
| TGFBR24036 | CTGAGGTCTATAAGGCCAAG | 20 | AsCpf1 | 171 |
| TGFBR24026 | TGATGTGAGATTTTCCACCT | 20 | AsCpf1 | 172 |
| TGFBR24038 | CCTATGAGGAGTATGCCTCT | 20 | AsCpf1 | 173 |
| TGFBR24033 | AAGTGACAGGCATCAGCCTC | 20 | AsCpf1 | 174 |
| TGFBR24028 | CCATGACCCCAAGCTCCCCT | 20 | AsCpf1 | 175 |
| TGFBR24031 | CTTCATAATGCACTTTGGAG | 20 | AsCpf1 | 176 |
| TGFBR24032 | TTCATGTGTTCCTGTAGCTC | 20 | AsCpf1 | 177 |
| TGFBR24029 | TTCTGGAAGATGCTGCTTCT | 20 | AsCpf1 | 178 |
| TGFBR24035 | CCCACCAGGGTGTCCAGCTC | 20 | AsCpf1 | 179 |
| TGFBR24037 | AGACAGTGGCAGTCAAGATC | 20 | AsCpf1 | 180 |
| TGFBR24041 | CCTGCGTCTGGACCCTACTC | 20 | AsCpf1 | 181 |
| TGFBR24025 | CACAACTGTGTAAATTTTGT | 20 | AsCpf1 | 182 |
| TGFBR24030 | GAGAAGCAGCATCTTCCAGA | 20 | AsCpf1 | 183 |
| TGFBR24027 | TGGTTGTCACAGGTGGAAAA | 20 | AsCpf1 | 184 |
| TGFBR24034 | CCAGGTTGAACTCAGCTTCT | 20 | AsCpf1 | 185 |
| TGFBR24043 | ATCACAAAATTTACACAGTTG | 21 | SauCas9 | 186 |
| TGFBR24065 | GGCATCAGCCTCCTGCCACCA | 21 | SauCas9 | 187 |
| TGFBR24110 | GTTAGCCAGGTCATCCACAGA | 21 | SauCas9 | 188 |
| TGFBR24099 | GCTGGGCAGCTCCCTCGCCCG | 21 | SauCas9 | 189 |
| TGFBR24064 | CAGGAGGCTGATGCCTGTCAC | 21 | SauCas9 | 190 |
| TGFBR24094 | GAGGAGCGGAAGACGGAGTTG | 21 | SauCas9 | 191 |
| TGFBR24108 | CGTCTGGACCCTACTCTGTCT | 21 | SauCas9 | 192 |
| TGFBR24058 | TTTTTCCTTCATAATGCACTT | 21 | SauCas9 | 193 |
| TGFBR24075 | CCATTGAGCTGGACACCCTGG | 21 | SauCas9 | 194 |
| TGFBR24057 | CTTCTCCAAAGTGCATTATGA | 21 | SauCas9 | 195 |
| TGFBR24103 | GCCCAAGATGCCCATCGTGCA | 21 | SauCas9 | 196 |
| TGFBR24060 | TCATGTGTTCCTGTAGCTCTG | 21 | SauCas9 | 197 |
| TGFBR24048 | GTGATGCTGCAGTTGCTCATG | 21 | SauCas9 | 198 |
| TGFBR24087 | TCTCATGCTTCAGATTGATGT | 21 | SauCas9 | 199 |
| TGFBR24081 | TCCCTATGAGGAGTATGCCTC | 21 | SauCas9 | 200 |
| TGFBR24044 | CATCACAAAATTTACACAGTT | 21 | SauCas9 | 201 |
| TGFBR24077 | ATTGAGCTGGACACCCTGGTG | 21 | SauCas9 | 202 |
| TGFBR24080 | CAGTCAAGATCTTTCCCTATG | 21 | SauCas9 | 203 |
| TGFBR24046 | AGGATTTCTGGTTGTCACAGG | 21 | SauCas9 | 204 |
| TGFBR24101 | TCCACAGTGATCACACTCCAT | 21 | SauCas9 | 205 |
| TGFBR24079 | AGCAGAACACTTCAGAGCAGT | 21 | SauCas9 | 206 |
| TGFBR24072 | CCGGCAAGACGCGGAAGCTCA | 21 | SauCas9 | 207 |
| TGFBR24074 | GATGTCAGAGCGGTCATCTTC | 21 | SauCas9 | 208 |
| TGFBR24062 | TCATTGCACTCATCAGAGCTA | 21 | SauCas9 | 209 |
| TGFBR24054 | CTTCCAGAATAAAGTCATGGT | 21 | SauCas9 | 210 |
| TGFBR24045 | AGATTTTCCACCTGTGACAAC | 21 | SauCas9 | 211 |
| TGFBR24049 | ACTGCAGCATCACCTCCATCT | 21 | SauCas9 | 212 |
| TGFBR24098 | AGCTGGGCAGCTCCCTCGCCC | 21 | SauCas9 | 213 |
| TGFBR24090 | TGACGGCTGAGGAGCGGAAGA | 21 | SauCas9 | 214 |
| TGFBR24076 | CATTGAGCTGGACACCCTGGT | 21 | SauCas9 | 215 |
| TGFBR24078 | AGCAAAGCGACCTTTCCCCAC | 21 | SauCas9 | 216 |
| TGFBR24067 | CGCGTTAACCGGCAGCAGAAG | 21 | SauCas9 | 217 |
| TGFBR24063 | GAAATATGACTAGCAACAAGT | 21 | SauCas9 | 218 |
| TGFBR24107 | AGACAGAGTAGGGTCCAGACG | 21 | SauCas9 | 219 |
| TGFBR24047 | CAGGATTTCTGGTTGTCACAG | 21 | SauCas9 | 220 |
| TGFBR24096 | CTCCTGTAGGTTGCCCTTGGC | 21 | SauCas9 | 221 |
| TGFBR24105 | ACAGAGTAGGGTCCAGACGCA | 21 | SauCas9 | 222 |
| TGFBR24056 | GCTTCTCCAAAGTGCATTATG | 21 | SauCas9 | 223 |
| TGFBR24068 | GCAGCAGAAGCTGAGTTCAAC | 21 | SauCas9 | 224 |
| TGFBR24093 | TGAGGAGCGGAAGACGGAGTT | 21 | SauCas9 | 225 |
| TGFBR24055 | CTTTGGAGAAGCAGCATCTTC | 21 | SauCas9 | 226 |
| TGFBR24053 | CTCCCCTACCATGACTTTATT | 21 | SauCas9 | 227 |
| TGFBR24106 | GACAGAGTAGGGTCCAGACGC | 21 | SauCas9 | 228 |
| TGFBR24092 | CTGAGGAGCGGAAGACGGAGT | 21 | SauCas9 | 229 |
| TGFBR24102 | GGGCATCTTGGGCCTCCCACA | 21 | SauCas9 | 230 |
| TGFBR24082 | CCAAGAGGCATACTCCTCATA | 21 | SauCas9 | 231 |
| TGFBR24051 | AGAATGACGAGAACATAACAC | 21 | SauCas9 | 232 |
| TGFBR24097 | CCTGACGCGGCATGTCATCAG | 21 | SauCas9 | 233 |
| TGFBR24073 | AGCGAGCACTGTGCCATCATC | 21 | SauCas9 | 234 |
| TGFBR24104 | GCAGGTTAGGTCGTTCTTCAC | 21 | SauCas9 | 235 |
| TGFBR24050 | ACCTCCATCTGTGAGAAGCCA | 21 | SauCas9 | 236 |
| TGFBR24052 | TAAAGTCATGGTAGGGGAGCT | 21 | SauCas9 | 237 |
| TGFBR24061 | TCAGAGCTACAGGAACACATG | 21 | SauCas9 | 238 |
| TGFBR24086 | TCTCAGACATCAATCTGAAGC | 21 | SauCas9 | 239 |
| TGFBR24066 | CATCAGCCTCCTGCCACCACT | 21 | SauCas9 | 240 |
| TGFBR24089 | CGCTCCTCAGCCGTCAGGAAC | 21 | SauCas9 | 241 |
| TGFBR24071 | AACCTGGGAAACCGGCAAGAC | 21 | SauCas9 | 242 |
| TGFBR24095 | TCCACGCCAAGGGCAACCTAC | 21 | SauCas9 | 243 |
| TGFBR24100 | GAGGTGAGCAATCCCCCGGGC | 21 | SauCas9 | 244 |
| TGFBR24069 | CAGCAGAAGCTGAGTTCAACC | 21 | SauCas9 | 245 |
| TGFBR24083 | TCCAAGAGGCATACTCCTCAT | 21 | SauCas9 | 246 |
| TGFBR24070 | AGCAGAAGCTGAGTTCAACCT | 21 | SauCas9 | 247 |
| TGFBR24088 | CCAGTTCCTGACGGCTGAGGA | 21 | SauCas9 | 248 |
| TGFBR24085 | AGGAGTATGCCTCTTGGAAGA | 21 | SauCas9 | 249 |
| TGFBR24084 | TTCCAAGAGGCATACTCCTCA | 21 | SauCas9 | 250 |
| TGFBR24042 | CAACTGTGTAAATTTTGTGAT | 21 | SauCas9 | 251 |
| TGFBR24059 | TGAAGGAAAAAAAAAAGCCTG | 21 | SauCas9 | 252 |
| TGFBR24091 | CGTCTTCCGCTCCTCAGCCGT | 21 | SauCas9 | 253 |
| TGFBR24109 | CCAGGTCATCCACAGACAGAG | 21 | SauCas9 | 254 |
| TGFBR2736 | GCCTAGAGTGAAGAGATTCAT | 21 | SpyCas9 | 255 |
| TGFBR2737 | GTTCTCCAAAGTGCATTATGA | 21 | SpyCas9 | 256 |
| TGFBR2738 | GCATCTTCCAGAATAAAGTCA | 21 | SpyCas9 | 257 |
| TGFBR2739 | TGATGTGAGATTTTCCACCTG | 21 | Cas12a | 1172 |

[0549] In some embodiments the gRNA for use in the disclosure is a gRNA targeting CISH (CISH gRNA). In some embodiments, the gRNA targeting CISH is one or more of the gRNAs described in Table 8.

TABLE 8
Exemplary CISH gRNAs

| | gRNA Targeting Domain | | | SEQ ID |
|---|---|---|---|---|
| Name | Sequence (DNA) | Length | Enzyme | NO: |
| CISH0873 | CAACCGTCTGGTGGCCGACG | 20 | SpyCas9 | 258 |
| CISH0874 | CAGGATCGGGGCTGTCGCTT | 20 | SpyCas9 | 259 |
| CISH0875 | TCGGGCCTCGCTGGCCGTAA | 20 | SpyCas9 | 260 |
| CISH0876 | GAGGTAGTCGGCCATGCGCC | 20 | SpyCas9 | 261 |
| CISH0877 | CAGGTGTTGTCGGGCCTCGC | 20 | SpyCas9 | 262 |
| CISH0878 | GGAGGTAGTCGGCCATGCGC | 20 | SpyCas9 | 263 |
| CISH0879 | GGCATACTCAATGCGTACAT | 20 | SpyCas9 | 264 |
| CISH0880 | CCGCCTTGTCATCAACCGTC | 20 | SpyCas9 | 265 |
| CISH0881 | AGGATCGGGGCTGTCGCTTC | 20 | SpyCas9 | 266 |
| CISH0882 | CCTTGTCATCAACCGTCTGG | 20 | SpyCas9 | 267 |
| CISH0883 | TACTCAATGCGTACATTGGT | 20 | SpyCas9 | 268 |
| CISH0884 | GGGTTCCATTACGGCCAGCG | 20 | SpyCas9 | 269 |
| CISH0885 | GGCACTGCTTCTGCGTACAA | 20 | SpyCas9 | 270 |
| CISH0886 | GGTTGATGACAAGGCGGCAC | 20 | SpyCas9 | 271 |
| CISH0887 | TGCTGGGGCCTTCCTCGAGG | 20 | SpyCas9 | 272 |
| CISH0888 | TTGCTGGCTGTGGAGCGGAC | 20 | SpyCas9 | 273 |
| CISH0889 | TTCTCCTACCTTCGGGAATC | 20 | SpyCas9 | 274 |
| CISH0890 | GACTGGCTTGGGCAGTTCCA | 20 | SpyCas9 | 275 |
| CISH0891 | CATGCAGCCCTTGCCTGCTG | 20 | SpyCas9 | 276 |
| CISH0892 | AGCAAAGGACGAGGTCTAGA | 20 | SpyCas9 | 277 |
| CISH0893 | GCCTGCTGGGGCCTTCCTCG | 20 | SpyCas9 | 278 |
| CISH0894 | CAGACTCACCAGATTCCCGA | 20 | SpyCas9 | 279 |
| CISH0895 | ACCTCGTCCTTTGCTGGCTG | 20 | SpyCas9 | 280 |
| CISH0896 | CTCACCAGATTCCCGAAGGT | 20 | SpyCas9 | 281 |
| CISH7048 | TACGCAGAAGCAGTGCCCGC | 20 | AsCpf1 | 282 |
| CISH7049 | AGGTGTACAGCAGTGGCTGG | 20 | AsCpf1 | 283 |
| CISH7050 | GGTGTACAGCAGTGGCTGGT | 20 | AsCpf1 | 284 |
| CISH7051 | CGGATGTGGTCAGCCTTGTG | 20 | AsCpf1 | 285 |
| CISH7052 | CACTGACAGCGTGAACAGGT | 20 | AsCpf1 | 286 |
| CISH7053 | ACTGACAGCGTGAACAGGTA | 20 | AsCpf1 | 287 |
| CISH7054 | GCTCACTCTCTGTCTGGGCT | 20 | AsCpf1 | 288 |
| CISH7055 | CTGGCTGTGGAGCGGACTGG | 20 | AsCpf1 | 289 |
| CISH7056 | GCTCTGACTGTACGGGGCAA | 20 | AsCpf1 RR | 290 |
| CISH7057 | AGCTCTGACTGTACGGGGCA | 20 | AsCpf1 RR | 291 |
| CISH7058 | ACAGTACCCCTTCCAGCTCT | 20 | AsCpf1 RR | 292 |
| CISH7059 | CGTCGGCCACCAGACGGTTG | 20 | AsCpf1 RR | 293 |
| CISH7060 | CCAGCCACTGCTGTACACCT | 20 | AsCpf1 RR | 294 |
| CISH7061 | ACCCCGGCCCTGCCTATGCC | 20 | AsCpf1 RR | 295 |
| CISH7062 | GGTATCAGCAGTGCAGGAGG | 20 | AsCpf1 RR | 296 |
| CISH7063 | GATGTGGTCAGCCTTGTGCA | 20 | AsCpf1 RR | 297 |
| CISH7064 | GGATGTGGTCAGCCTTGTGC | 20 | AsCpf1 RR | 298 |
| CISH7065 | GGCCACGCATCCTGGCCTTT | 20 | AsCpf1 RR | 299 |
| CISH7066 | GAAAGGCCAGGATGCGTGGC | 20 | AsCpf1 RR | 300 |
| CISH7067 | ACTGCTTGTCCAGGCCACGC | 20 | AsCpf1 RR | 301 |
| CISH7068 | TCTGGACTCCAACTGCTTGT | 20 | AsCpf1 RR | 302 |
| CISH7069 | GTCTGGACTCCAACTGCTTG | 20 | AsCpf1 RR | 303 |
| CISH7070 | GCTTCCGTCTGGACTCCAAC | 20 | AsCpf1 RR | 304 |
| CISH7071 | GACGGAAGCTGGAGTCGGCA | 20 | AsCpf1 RR | 305 |
| CISH7072 | CGCTGTCAGTGAAAACCACT | 20 | AsCpf1 RR | 306 |
| CISH7073 | CTGACAGCGTGAACAGGTAG | 20 | AsCpf1 RR | 307 |
| CISH7074 | TTACGGCCAGCGAGGCCCGA | 20 | AsCpf1 RR | 308 |
| CISH7075 | ATTACGGCCAGCGAGGCCCG | 20 | AsCpf1 RR | 309 |
| CISH7076 | GGAATCTGGTGAGTCTGAGG | 20 | AsCpf1 RR | 310 |
| CISH7077 | CCCTCAGACTCACCAGATTC | 20 | AsCpf1 RR | 311 |
| CISH7078 | CGAAGGTAGGAGAAGGTCTT | 20 | AsCpf1 RR | 312 |
| CISH7079 | GAAGGTAGGAGAAGGTCTTG | 20 | AsCpf1 RR | 313 |
| CISH7080 | GCACCTTTGGCTCACTCTCT | 20 | AsCpf1 RR | 314 |
| CISH7081 | TCGAGGAGGTGGCAGAGGGT | 20 | AsCpf1 RR | 315 |
| CISH7082 | TGGAACTGCCCAAGCCAGTC | 20 | AsCpf1 RR | 316 |
| CISH7083 | AGGGACGGGGCCCACAGGGG | 20 | AsCpf1 RR | 317 |
| CISH7084 | GGGACGGGGCCCACAGGGGC | 20 | AsCpf1 RR | 318 |
| CISH7085 | CTCCACAGCCAGCAAAGGAC | 20 | AsCpf1 RR | 319 |
| CISH7086 | CAGCCAGCAAAGGACGAGGT | 20 | AsCpf1 RR | 320 |
| CISH7087 | CTGCCTTCTAGACCTCGTCC | 20 | AsCpf1 RR | 321 |
| CISH7088 | CCTAAGGAGGATGCGCCTAG | 20 | AsCpf1 RVR | 322 |
| CISH7089 | TGGCCTCCTGCACTGCTGAT | 20 | AsCpf1 RVR | 323 |
| CISH7090 | AGCAGTGCAGGAGGCCACAT | 20 | AsCpf1 RVR | 324 |
| CISH7091 | CCGACTCCAGCTTCCGTCTG | 20 | AsCpf1 RVR | 325 |
| CISH7092 | GGGGTTCCATTACGGCCAGC | 20 | AsCpf1 RVR | 326 |
| CISH7093 | CACAGCAGATCCTCCTCTGG | 20 | AsCpf1 RVR | 327 |
| CISH7094 | ATTGCCCCGTACAGTCAGAG | 20 | SauCas9 | 328 |
| CISH7095 | CCCGTACAGTCAGAGCTGGA | 20 | SauCas9 | 329 |
| CISH7096 | TGGTGGAGGAGCAGGCAGTG | 20 | SauCas9 | 330 |
| CISH7097 | TCCTTAGGCATAGGCAGGGC | 20 | SauCas9 | 331 |
| CISH7098 | CGGCCCTGCCTATGCCTAAG | 20 | SauCas9 | 332 |
| CISH7099 | TAGGCATAGGCAGGGCCGGG | 20 | SauCas9 | 333 |
| CISH7100 | AGGCAGGGCCGGGGTGGGAG | 20 | SauCas9 | 334 |
| CISH7101 | GCAGGATCGGGGCTGTCGCT | 20 | SauCas9 | 335 |
| CISH7102 | CTGCACAAGGCTGACCACAT | 20 | SauCas9 | 336 |
| CISH7103 | TGCACAAGGCTGACCACATC | 20 | SauCas9 | 337 |
| CISH7104 | CTGACCACATCCGGAAAGGC | 20 | SauCas9 | 338 |
| CISH7105 | GGCCACGCATCCTGGCCTTT | 20 | SauCas9 | 339 |
| CISH7106 | GCGTGGCCTGGACAAGCAGT | 20 | SauCas9 | 340 |
| CISH7107 | GACAAGCAGTTGGAGTCCAG | 20 | SauCas9 | 341 |
| CISH7108 | GTTGGAGTCCAGACGGAAGC | 20 | SauCas9 | 342 |
| CISH7109 | ATGCGTACATTGGTGGGGCC | 20 | SauCas9 | 343 |
| CISH7110 | TGGCCCCACCAATGTACGCA | 20 | SauCas9 | 344 |
| CISH7111 | GCTACCTGTTCACGCTGTCA | 20 | SauCas9 | 345 |
| CISH7112 | TGACAGCGTGAACAGGTAGC | 20 | SauCas9 | 346 |
| CISH7113 | GTCGGGCCTCGCTGGCCGTA | 20 | SauCas9 | 347 |
| CISH7114 | GCACTTGCCTAGGCTGGTAT | 20 | SauCas9 | 348 |
| CISH7115 | GGGAATCTGGTGAGTCTGAG | 20 | SauCas9 | 349 |
| CISH7116 | CTCACCAGATTCCCGAAGGT | 20 | SauCas9 | 350 |
| CISH7117 | CTCCTACCTTCGGGAATCTG | 20 | SauCas9 | 351 |
| CISH7118 | CAAGACCTTCTCCTACCTTC | 20 | SauCas9 | 352 |
| CISH7119 | CCAAGACCTTCTCCTACCTT | 20 | SauCas9 | 353 |
| CISH7120 | GCCAAGACCTTCTCCTACCT | 20 | SauCas9 | 354 |
| CISH7121 | TATGCACAGCAGATCCTCCT | 20 | SauCas9 | 355 |
| CISH7122 | CAAAGGTGCTGGACCCAGAG | 20 | SauCas9 | 356 |
| CISH7123 | GGCTCACTCTCTGTCTGGGC | 20 | SauCas9 | 357 |
| CISH7124 | AGGGTACCCCAGCCCAGACA | 20 | SauCas9 | 358 |
| CISH7125 | AGAGGGTACCCCAGCCCAGA | 20 | SauCas9 | 359 |
| CISH7126 | GTACCCTCTGCCACCTCCTC | 20 | SauCas9 | 360 |
| CISH7127 | CCTTCCTCGAGGAGGTGGCA | 20 | SauCas9 | 361 |
| CISH7128 | ATGACTGGCTTGGGCAGTTC | 20 | SauCas9 | 362 |
| CISH7129 | GGCCCCTGTGGGCCCCGTCC | 20 | SauCas9 | 363 |
| CISH7130 | AGGACGAGGTCTAGAAGGCA | 20 | SauCas9 | 364 |
| CISH7131 | ACTGACAGCGTGAACAGGTAG | 21 | Cas12a | 1173 |

[0550] In some embodiments, the gRNA for use in the disclosure is a gRNA targeting B2M (B2M gRNA). In some embodiments, the gRNA targeting B2M is one or more of the gRNAs described in Table 9.

TABLE 9
Exemplary B2M gRNAs

| | gRNA Targeting Domain Target | | | SEQ ID |
|---|---|---|---|---|
| gRNA name | sequence (DNA) | Length | Enzyme | NO: |
| B2M1 | TATAAGTGGAGGCGTCGCGC | 20 | SpyCas9 | 365 |
| B2M2 | GGGCACGCGTTTAATATAAG | 20 | SpyCas9 | 366 |
| B2M3 | ACTCACGCTGGATAGCCTCC | 20 | SpyCas9 | 367 |
| B2M4 | GGCCGAGATGTCTCGCTCCG | 20 | SpyCas9 | 368 |
| B2M5 | CACGCGTTTAATATAAGTGG | 20 | SpyCas9 | 369 |
| B2M6 | AAGTGGAGGCGTCGCGCTGG | 20 | SpyCas9 | 370 |
| B2M7 | GAGTAGCGCGAGCACAGCTA | 20 | SpyCas9 | 371 |
| B2M8 | AGTGGAGGCGTCGCGCTGGC | 20 | SpyCas9 | 372 |
| B2M9 | GCCCGAATGCTGTCAGCTTC | 20 | SpyCas9 | 373 |
| B2M10 | CGCGAGCACAGCTAAGGCCA | 20 | SpyCas9 | 374 |
| B2M11 | CTCGCGCTACTCTCTCTTTC | 20 | SpyCas9 | 375 |
| B2M12 | GGCCACGGAGCGAGACATCT | 20 | SpyCas9 | 376 |
| B2M13 | CGTGAGTAAACCTGAATCTT | 20 | SpyCas9 | 377 |
| B2M14 | AGTCACATGGTTCACACGGC | 20 | SpyCas9 | 378 |
| B2M15 | AAGTCAACTTCAATGTCGGA | 20 | SpyCas9 | 379 |
| B2M16 | CAGTAAGTCAACTTCAATGT | 20 | SpyCas9 | 380 |
| B2M17 | ACCCAGACACATAGCAATTC | 20 | SpyCas9 | 381 |
| B2M18 | GCATACTCATCTTTTTCAGT | 20 | SpyCas9 | 382 |
| B2M19 | ACAGCCCAAGATAGTTAAGT | 20 | SpyCas9 | 383 |
| B2M20 | GGCATACTCATCTTTTTCAG | 20 | SpyCas9 | 384 |
| B2M21 | TTCCTGAAGCTGACAGCATT | 20 | SpyCas9 | 385 |
| B2M22 | TCACGTCATCCAGCAGAGAA | 20 | SpyCas9 | 386 |
| B2M23 | CAGCCCAAGATAGTTAAGTG | 20 | SpyCas9 | 387 |
| B2M-c1 | AAUUCUCUCUCCAUUCUU | 18 | AsCpf1 | 388 |
| B2M-c2 | AAUUCUCUCUCCAUUCUUC | 19 | AsCpf1 | 389 |
| B2M-c3 | AAUUCUCUCUCCAUUCUUCA | 20 | AsCpf1 | 390 |
| B2M-c4 | AAUUCUCUCUCCAUUCUUCAG | 21 | AsCpf1 | 391 |
| B2M-c5 | AAUUCUCUCUCCAUUCUUCAGU | 22 | AsCpf1 | 392 |
| B2M-c6 | AAUUCUCUCUCCAUUCUUCAGUA | 23 | AsCpf1 | 393 |
| B2M-c7 | AAUUCUCUCUCCAUUCUUCAGUAA | 24 | AsCpf1 | 394 |
| B2M-c8 | ACUUUCCAUUCUCUGCUG | 18 | AsCpf1 | 395 |
| B2M-c9 | ACUUUCCAUUCUCUGCUGG | 19 | AsCpf1 | 396 |
| B2M-c10 | ACUUUCCAUUCUCUGCUGGA | 20 | AsCpf1 | 397 |
| B2M-c11 | ACUUUCCAUUCUCUGCUGGAU | 21 | AsCpf1 | 398 |
| B2M-c12 | ACUUUCCAUUCUCUGCUGGAUG | 22 | AsCpf1 | 399 |
| B2M-c13 | ACUUUCCAUUCUCUGCUGGAUGA | 23 | AsCpf1 | 400 |
| B2M-c14 | ACUUUCCAUUCUCUGCUGGAUGAC | 24 | AsCpf1 | 401 |
| B2M-c15 | AGCAAGGACUGGUCUUUC | 18 | AsCpf1 | 402 |
| B2M-c16 | AGCAAGGACUGGUCUUUCU | 19 | AsCpf1 | 403 |
| B2M-c17 | AGCAAGGACUGGUCUUUCUA | 20 | AsCpf1 | 404 |
| B2M-c18 | AGCAAGGACUGGUCUUUCUAU | 21 | AsCpf1 | 405 |
| B2M-c19 | AGCAAGGACUGGUCUUUCUAUC | 22 | AsCpf1 | 406 |
| B2M-c20 | AGCAAGGACUGGUCUUUCUAUCU | 23 | AsCpf1 | 407 |
| B2M-c21 | AGCAAGGACUGGUCUUUCUAUCUC | 24 | AsCpf1 | 408 |
| B2M-c22 | AGUGGGGGUGAAUUCAGU | 18 | AsCpf1 | 409 |
| B2M-c23 | AGUGGGGGUGAAUUCAGUG | 19 | AsCpf1 | 410 |
| B2M-c24 | AGUGGGGGUGAAUUCAGUGU | 20 | AsCpf1 | 411 |
| B2M-c25 | AGUGGGGGUGAAUUCAGUGUA | 21 | AsCpf1 | 412 |
| B2M-c26 | AGUGGGGGUGAAUUCAGUGUAG | 22 | AsCpf1 | 413 |
| B2M-c27 | AGUGGGGGUGAAUUCAGUGUAGU | 23 | AsCpf1 | 414 |
| B2M-c28 | AGUGGGGGUGAAUUCAGUGUAGUA | 24 | AsCpf1 | 415 |
| B2M-c29 | AUCCAUCCGACAUUGAAG | 18 | AsCpf1 | 416 |
| B2M-c30 | AUCCAUCCGACAUUGAAGU | 19 | AsCpf1 | 417 |
| B2M-c31 | AUCCAUCCGACAUUGAAGUU | 20 | AsCpf1 | 418 |
| B2M-c32 | AUCCAUCCGACAUUGAAGUUG | 21 | AsCpf1 | 419 |
| B2M-c33 | AUCCAUCCGACAUUGAAGUUGA | 22 | AsCpf1 | 420 |
| B2M-c34 | AUCCAUCCGACAUUGAAGUUGAC | 23 | AsCpf1 | 421 |
| B2M-c35 | AUCCAUCCGACAUUGAAGUUGACU | 24 | AsCpf1 | 422 |
| B2M-c36 | CAAUUCUCUCUCCAUUCU | 18 | AsCpf1 | 423 |
| B2M-c37 | CAAUUCUCUCUCCAUUCUU | 19 | AsCpf1 | 424 |
| B2M-c38 | CAAUUCUCUCUCCAUUCUUC | 20 | AsCpf1 | 425 |
| B2M-c39 | CAAUUCUCUCUCCAUUCUUCA | 21 | AsCpf1 | 426 |
| B2M-c40 | CAAUUCUCUCUCCAUUCUUCAG | 22 | AsCpf1 | 427 |
| B2M-c41 | CAAUUCUCUCUCCAUUCUUCAGU | 23 | AsCpf1 | 428 |
| B2M-c42 | CAAUUCUCUCUCCAUUCUUCAGUA | 24 | AsCpf1 | 429 |
| B2M-c43 | CAGUGGGGGUGAAUUCAG | 18 | AsCpf1 | 430 |
| B2M-c44 | CAGUGGGGGUGAAUUCAGU | 19 | AsCpf1 | 431 |
| B2M-c45 | CAGUGGGGGUGAAUUCAGUG | 20 | AsCpf1 | 432 |
| B2M-c46 | CAGUGGGGGUGAAUUCAGUGU | 21 | AsCpf1 | 433 |
| B2M-c47 | CAGUGGGGGUGAAUUCAGUGUA | 22 | AsCpf1 | 434 |
| B2M-c48 | CAGUGGGGGUGAAUUCAGUGUAG | 23 | AsCpf1 | 435 |
| B2M-c49 | CAGUGGGGGUGAAUUCAGUGUAGU | 24 | AsCpf1 | 436 |
| B2M-c50 | CAUUCUCUGCUGGAUGAC | 18 | AsCpf1 | 437 |
| B2M-c51 | CAUUCUCUGCUGGAUGACG | 19 | AsCpf1 | 438 |
| B2M-c52 | CAUUCUCUGCUGGAUGACGU | 20 | AsCpf1 | 439 |
| B2M-c53 | CAUUCUCUGCUGGAUGACGUG | 21 | AsCpf1 | 440 |
| B2M-c54 | CAUUCUCUGCUGGAUGACGUGA | 22 | AsCpf1 | 44 |
| B2M-c55 | CAUUCUCUGCUGGAUGACGUGAG | 23 | AsCpf1 | 442 |
| B2M-c56 | CAUUCUCUGCUGGAUGACGUGAGU | 24 | AsCpf1 | 443 |
| B2M-c57 | CCCGAUAUUCCUCAGGUA | 18 | AsCpf1 | 444 |
| B2M-c58 | CCCGAUAUUCCUCAGGUAC | 19 | AsCpf1 | 445 |
| B2M-c59 | CCCGAUAUUCCUCAGGUACU | 20 | AsCpf1 | 446 |
| B2M-c60 | CCCGAUAUUCCUCAGGUACUC | 21 | AsCpf1 | 447 |
| B2M-c61 | CCCGAUAUUCCUCAGGUACUCC | 22 | AsCpf1 | 448 |
| B2M-c62 | CCCGAUAUUCCUCAGGUACUCCA | 23 | AsCpf1 | 449 |
| B2M-c63 | CCCGAUAUUCCUCAGGUACUCCAA | 24 | AsCpf1 | 450 |
| B2M-c64 | CCGAUAUUCCUCAGGUAC | 18 | AsCpf1 | 451 |
| B2M-c65 | CCGAUAUUCCUCAGGUACU | 19 | AsCpf1 | 452 |
| B2M-c66 | CCGAUAUUCCUCAGGUACUC | 20 | AsCpf1 | 453 |
| B2M-c67 | CCGAUAUUCCUCAGGUACUCC | 21 | AsCpf1 | 454 |
| B2M-c68 | CCGAUAUUCCUCAGGUACUCCA | 22 | AsCpf1 | 455 |
| B2M-c69 | CCGAUAUUCCUCAGGUACUCCAA | 23 | AsCpf1 | 456 |
| B2M-c70 | CCGAUAUUCCUCAGGUACUCCAAA | 24 | AsCpf1 | 457 |
| B2M-c71 | CUCACGUCAUCCAGCAGA | 18 | AsCpf1 | 458 |
| B2M-c72 | CUCACGUCAUCCAGCAGAG | 19 | AsCpf1 | 459 |
| B2M-c73 | CUCACGUCAUCCAGCAGAGA | 20 | AsCpf1 | 460 |
| B2M-c74 | CUCACGUCAUCCAGCAGAGAA | 21 | AsCpf1 | 461 |
| B2M-c75 | CUCACGUCAUCCAGCAGAGAAU | 22 | AsCpf1 | 462 |
| B2M-c76 | CUCACGUCAUCCAGCAGAGAAUG | 23 | AsCpf1 | 463 |
| B2M-c77 | CUCACGUCAUCCAGCAGAGAAUGG | 24 | AsCpf1 | 464 |
| B2M-c78 | CUGAAUUGCUAUGUGUCU | 18 | AsCpf1 | 465 |
| B2M-c79 | CUGAAUUGCUAUGUGUCUG | 19 | AsCpf1 | 466 |
| B2M-c80 | CUGAAUUGCUAUGUGUCUGG | 20 | AsCpf1 | 467 |
| B2M-c81 | CUGAAUUGCUAUGUGUCUGGG | 21 | AsCpf1 | 468 |
| B2M-c82 | CUGAAUUGCUAUGUGUCUGGGU | 22 | AsCpf1 | 469 |
| B2M-c83 | CUGAAUUGCUAUGUGUCUGGGUU | 23 | AsCpf1 | 470 |
| B2M-c84 | CUGAAUUGCUAUGUGUCUGGGUUU | 24 | AsCpf1 | 471 |
| B2M-c85 | GAGUACCUGAGGAAUAUC | 18 | AsCpf1 | 472 |
| B2M-c86 | GAGUACCUGAGGAAUAUCG | 19 | AsCpf1 | 473 |
| B2M-c87 | GAGUACCUGAGGAAUAUCGG | 20 | AsCpf1 | 474 |
| B2M-c88 | GAGUACCUGAGGAAUAUCGGG | 21 | AsCpf1 | 475 |
| B2M-c89 | GAGUACCUGAGGAAUAUCGGGA | 22 | AsCpf1 | 476 |
| B2M-c90 | GAGUACCUGAGGAAUAUCGGGAA | 23 | AsCpf1 | 477 |
| B2M-c91 | GAGUACCUGAGGAAUAUCGGGAAA | 24 | AsCpf1 | 478 |
| B2M-c92 | UAUCUCUUGUACUACACU | 18 | AsCpf1 | 479 |
| B2M-c93 | UAUCUCUUGUACUACACUG | 19 | AsCpf1 | 480 |
| B2M-c94 | UAUCUCUUGUACUACACUGA | 20 | AsCpf1 | 481 |
| B2M-c95 | UAUCUCUUGUACUACACUGAA | 21 | AsCpf1 | 482 |
| B2M-c96 | UAUCUCUUGUACUACACUGAAU | 22 | AsCpf1 | 483 |
| B2M-c97 | UAUCUCUUGUACUACACUGAAUU | 23 | AsCpf1 | 484 |
| B2M-c98 | UAUCUCUUGUACUACACUGAAUUC | 24 | AsCpf1 | 485 |
| B2M-c99 | UCAAUUCUCUCUCCAUUC | 18 | AsCpf1 | 486 |
| B2M-c100 | UCAAUUCUCUCUCCAUUCU | 19 | AsCpf1 | 487 |
| B2M-c101 | UCAAUUCUCUCUCCAUUCUU | 20 | AsCpf1 | 488 |
| B2M-c102 | UCAAUUCUCUCUCCAUUCUUC | 21 | AsCpf1 | 489 |
| B2M-c103 | UCAAUUCUCUCUCCAUUCUUCA | 22 | AsCpf1 | 490 |
| B2M-c104 | UCAAUUCUCUCUCCAUUCUUCAG | 23 | AsCpf1 | 491 |
| B2M-c105 | UCAAUUCUCUCUCCAUUCUUCAGU | 24 | AsCpf1 | 492 |
| B2M-c106 | UCACAGCCCAAGAUAGUU | 18 | AsCpf1 | 493 |
| B2M-c107 | UCACAGCCCAAGAUAGUUA | 19 | AsCpf1 | 494 |
| B2M-c108 | UCACAGCCCAAGAUAGUUAA | 20 | AsCpf1 | 495 |
| B2M-c109 | UCACAGCCCAAGAUAGUUAAG | 21 | AsCpf1 | 496 |
| B2M-c110 | UCACAGCCCAAGAUAGUUAAGU | 22 | AsCpf1 | 497 |
| B2M-c111 | UCACAGCCCAAGAUAGUUAAGUG | 23 | AsCpf1 | 498 |
| B2M-c112 | UCACAGCCCAAGAUAGUUAAGUGG | 24 | AsCpf1 | 499 |
| B2M-c113 | UCAGUGGGGGUGAAUUCA | 18 | AsCpf1 | 500 |
| B2M-c114 | UCAGUGGGGGUGAAUUCAG | 19 | AsCpf1 | 501 |
| B2M-c115 | UCAGUGGGGGUGAAUUCAGU | 20 | AsCpf1 | 502 |
| B2M-c116 | UCAGUGGGGGUGAAUUCAGUG | 21 | AsCpf1 | 503 |
| B2M-c117 | UCAGUGGGGGUGAAUUCAGUGU | 22 | AsCpf1 | 504 |
| B2M-c118 | UCAGUGGGGGUGAAUUCAGUGUA | 23 | AsCpf1 | 505 |
| B2M-c119 | UCAGUGGGGGUGAAUUCAGUGUAG | 24 | AsCpf1 | 506 |
| B2M-c120 | UGGCCUGGAGGCUAUCCA | 18 | AsCpf1 | 507 |
| B2M-c121 | UGGCCUGGAGGCUAUCCAG | 19 | AsCpf1 | 508 |
| B2M-c122 | UGGCCUGGAGGCUAUCCAGC | 20 | AsCpf1 | 509 |
| B2M-c123 | UGGCCUGGAGGCUAUCCAGCG | 21 | AsCpf1 | 510 |
| B2M-c124 | UGGCCUGGAGGCUAUCCAGCGU | 22 | AsCpf1 | 511 |
| B2M-c125 | UGGCCUGGAGGCUAUCCAGCGUG | 23 | AsCpf1 | 512 |
| B2M-c126 | UGGCCUGGAGGCUAUCCAGCGUGA | 24 | AsCpf1 | 513 |
| B2M-c127 | AUAGAUCGAGACAUGUAA | 18 | AsCpf1 | 514 |
| B2M-c128 | AUAGAUCGAGACAUGUAAG | 19 | AsCpf1 | 515 |
| B2M-c129 | AUAGAUCGAGACAUGUAAGC | 20 | AsCpf1 | 516 |
| B2M-c130 | AUAGAUCGAGACAUGUAAGCA | 21 | AsCpf1 | 517 |
| B2M-c131 | AUAGAUCGAGACAUGUAAGCAG | 22 | AsCpf1 | 518 |
| B2M-c132 | AUAGAUCGAGACAUGUAAGCAGC | 23 | AsCpf1 | 519 |
| B2M-c133 | AUAGAUCGAGACAUGUAAGCAGCA | 24 | AsCpf1 | 520 |
| B2M-c134 | CAUAGAUCGAGACAUGUA | 18 | AsCpf1 | 521 |
| B2M-c135 | CAUAGAUCGAGACAUGUAA | 19 | AsCpf1 | 522 |
| B2M-c136 | CAUAGAUCGAGACAUGUAAG | 20 | AsCpf1 | 523 |
| B2M-c137 | CAUAGAUCGAGACAUGUAAGC | 21 | AsCpf1 | 524 |
| B2M-c138 | CAUAGAUCGAGACAUGUAAGCA | 22 | AsCpf1 | 525 |
| B2M-c139 | CAUAGAUCGAGACAUGUAAGCAG | 23 | AsCpf1 | 526 |
| B2M-c140 | CAUAGAUCGAGACAUGUAAGCAGC | 24 | AsCpf1 | 527 |
| B2M-c141 | CUCCACUGUCUUUUUCAU | 18 | AsCpf1 | 528 |
| B2M-c142 | CUCCACUGUCUUUUUCAUA | 19 | AsCpf1 | 529 |
| B2M-c143 | CUCCACUGUCUUUUUCAUAG | 20 | AsCpf1 | 530 |
| B2M-c144 | CUCCACUGUCUUUUUCAUAGA | 21 | AsCpf1 | 531 |
| B2M-c145 | CUCCACUGUCUUUUUCAUAGAU | 22 | AsCpf1 | 532 |
| B2M-c146 | CUCCACUGUCUUUUUCAUAGAUC | 23 | AsCpf1 | 533 |
| B2M-c147 | CUCCACUGUCUUUUUCAUAGAUCG | 24 | AsCpf1 | 534 |
| B2M-c148 | UCAUAGAUCGAGACAUGU | 18 | AsCpf1 | 535 |
| B2M-c149 | UCAUAGAUCGAGACAUGUA | 19 | AsCpf1 | 536 |
| B2M-c150 | UCAUAGAUCGAGACAUGUAA | 20 | AsCpf1 | 537 |
| B2M-c151 | UCAUAGAUCGAGACAUGUAAG | 21 | AsCpf1 | 538 |
| B2M-c152 | UCAUAGAUCGAGACAUGUAAGC | 22 | AsCpf1 | 539 |
| B2M-c153 | UCAUAGAUCGAGACAUGUAAGCA | 23 | AsCpf1 | 540 |
| B2M-c154 | UCAUAGAUCGAGACAUGUAAGCAG | 24 | AsCpf1 | 541 |
| B2M-c155 | UCCACUGUCUUUUUCAUA | 18 | AsCpf1 | 542 |
| B2M-c156 | UCCACUGUCUUUUUCAUAG | 19 | AsCpf1 | 543 |
| B2M-c157 | UCCACUGUCUUUUUCAUAGA | 20 | AsCpf1 | 544 |
| B2M-c158 | UCCACUGUCUUUUUCAUAGAU | 21 | AsCpf1 | 545 |
| B2M-c159 | UCCACUGUCUUUUUCAUAGAUC | 22 | AsCpf1 | 546 |
| B2M-c160 | UCCACUGUCUUUUUCAUAGAUCG | 23 | AsCpf1 | 547 |
| B2M-c161 | UCCACUGUCUUUUUCAUAGAUCGA | 24 | AsCpf1 | 548 |
| B2M-c162 | UCUCCACUGUCUUUUUCA | 18 | AsCpf1 | 549 |
| B2M-c163 | UCUCCACUGUCUUUUUCAU | 19 | AsCpf1 | 550 |
| B2M-c164 | UCUCCACUGUCUUUUUCAUA | 20 | AsCpf1 | 551 |
| B2M-c165 | UCUCCACUGUCUUUUUCAUAG | 21 | AsCpf1 | 552 |
| B2M-c166 | UCUCCACUGUCUUUUUCAUAGA | 22 | AsCpf1 | 553 |
| B2M-c167 | UCUCCACUGUCUUUUUCAUAGAU | 23 | AsCpf1 | 554 |
| B2M-c168 | UCUCCACUGUCUUUUUCAUAGAUC | 24 | AsCpf1 | 555 |
| B2M-c169 | UUCUCCACUGUCUUUUUC | 18 | AsCpf1 | 556 |
| B2M-c170 | UUCUCCACUGUCUUUUUCA | 19 | AsCpf1 | 557 |
| B2M-c171 | UUCUCCACUGUCUUUUUCAU | 20 | AsCpf1 | 558 |
| B2M-c172 | UUCUCCACUGUCUUUUUCAUA | 21 | AsCpf1 | 559 |
| B2M-c173 | UUCUCCACUGUCUUUUUCAUAG | 22 | AsCpf1 | 560 |
| B2M-c174 | UUCUCCACUGUCUUUUUCAUAGA | 23 | AsCpf1 | 561 |
| B2M-c175 | UUCUCCACUGUCUUUUUCAUAGAU | 24 | AsCpf1 | 562 |
| B2M-c176 | UUUCUCCACUGUCUUUUU | 18 | AsCpf1 | 563 |
| B2M-c177 | UUUCUCCACUGUCUUUUUC | 19 | AsCpf1 | 564 |
| B2M-c178 | UUUCUCCACUGUCUUUUUCA | 20 | AsCpf1 | 565 |
| B2M-c179 | UUUCUCCACUGUCUUUUUCAU | 21 | AsCpf1 | 566 |
| B2M-c180 | UUUCUCCACUGUCUUUUUCAUA | 22 | AsCpf1 | 567 |
| B2M-c181 | UUUCUCCACUGUCUUUUUCAUAG | 23 | AsCpf1 | 568 |
| B2M-c182 | UUUCUCCACUGUCUUUUUCAUAGA | 24 | AsCpf1 | 569 |
| B2M-c183 | UUUUCUCCACUGUCUUUU | 18 | AsCpf1 | 570 |
| B2M-c184 | UUUUCUCCACUGUCUUUUU | 19 | AsCpf1 | 571 |
| B2M-c185 | UUUUCUCCACUGUCUUUUUC | 20 | AsCpf1 | 572 |
| B2M-c186 | UUUUCUCCACUGUCUUUUUCA | 21 | AsCpf1 | 573 |
| B2M-c187 | UUUUCUCCACUGUCUUUUUCAU | 22 | AsCpf1 | 574 |
| B2M-c188 | UUUUCUCCACUGUCUUUUUCAUA | 23 | AsCpf1 | 575 |
| B2M-c189 | UUUUCUCCACUGUCUUUUUCAUAG | 24 | AsCpf1 | 576 |

[0551] In some embodiments, the gRNA for use in the disclosure is a gRNA targeting PD1. gRNAs targeting B2M and PD1 for use in the disclosure are further described in WO2015161276 and WO2017152015 by Welstead et al.; both incorporated in their entirety herein by reference.

[0552] In some embodiments, the gRNA for use in the disclosure is a gRNA targeting NKG2A (NKG2A gRNA). In some embodiments, the gRNA targeting NKG2A is one or more of the gRNAs described in Table 10.

TABLE 10
Exemplary NKG2A gRNAs

| | gRNA Targeting Domain | | | SEQ ID |
|---|---|---|---|---|
| Name | Sequence (DNA) | Length | Enzyme | NO: |
| NKG2A55 | GAGGTAAAGCGTTTGCATTTG | 21 | AsCpf1 | 577 |
| NKG2A56 | CCTCTAAAGCTTATGCTTACA | 21 | AsCpf1 | 578 |
| NKG2A57 | AGTCGATTTACTTGTAGCACT | 21 | AsCpf1 | 579 |
| NKG2A58 | CTTGTAGCACTGCACAGTTAA | 21 | AsCpf1 | 580 |
| NKG2A59 | TCCATTACAGGATAAAAGACT | 21 | AsCpf1 | 581 |
| NKG2A60 | CTCCATTACAGGATAAAAGAC | 21 | AsCpf1 | 582 |
| NKG2A61 | TCTCCATTACAGGATAAAAGA | 21 | AsCpf1 | 583 |
| NKG2A62 | ATCCTGTAATGGAGAAAAATC | 21 | AsCpf1 | 584 |
| NKG2A63 | TCCTGTAATGGAGAAAAATCC | 21 | AsCpf1 | 585 |
| NKG2A136 | AAACATGAGTAAGTTGTTTTG | 21 | AsCpf1 | 586 |
| NKG2A137 | GCTTTCAAACATGAGTAAGTT | 21 | AsCpf1 | 587 |
| NKG2A138 | AAAGCCAAACCATTCATTGTC | 21 | AsCpf1 | 588 |
| NKG2A139 | GTAACAGCAGTCATCATCCAT | 21 | AsCpf1 | 589 |
| NKG2A140 | ACCATCCTCATGGATTGGTGT | 21 | AsCpf1 | 590 |
| NKG2A141 | TGTCCATCATTTCACCATCCT | 21 | AsCpf1 | 591 |
| NKG2A142 | GAAATTTCTGTCCATCATTTC | 21 | AsCpf1 | 592 |
| NKG2A143 | AGAAATTTCTGTCCATCATTT | 21 | AsCpf1 | 593 |
| NKG2A144 | TTTTAGAAATTTCTGTCCATC | 21 | AsCpf1 | 594 |
| NKG2A145 | CTTTTAGAAATTTCTGTCCAT | 21 | AsCpf1 | 595 |
| NKG2A146 | TTTTCTTTTAGAAATTTCTGT | 21 | AsCpf1 | 596 |
| NKG2A147 | TAAAAGAAAAGAAAGAATTTT | 21 | AsCpf1 | 597 |
| NKG2A270 | AAACATTTACATCTTACCATT | 21 | AsCpf1 | 598 |
| NKG2A271 | CATCTTACCATTTCTTCTTCA | 21 | AsCpf1 | 599 |
| NKG2A272 | TATAGATAATGAAGAAGAAAT | 21 | AsCpf1 | 600 |
| NKG2A273 | TTCTTCATTATCTATAGAAAG | 21 | AsCpf1 | 601 |
| NKG2A274 | CTGGCCTGTACTTCGAAGAAC | 21 | AsCpf1 | 602 |
| NKG2A275 | CTTACCAATGTAGTAACAACT | 21 | AsCpf1 | 603 |
| NKG2A276 | GCACGTCATTGTGGCCATTGT | 21 | AsCpf1 | 604 |
| NKG2A277 | TTTAGCACGTCATTGTGGCCA | 21 | AsCpf1 | 605 |
| NKG2A414 | CCATCAGCTCCAGAGAAGCTC | 21 | AsCpf1 | 606 |
| NKG2A415 | TCTCCCTGCAGATTTACCATC | 21 | AsCpf1 | 607 |
| NKG2A437 | AAATGCTTTACCTTTGCAGTG | 21 | AsCpf1 | 608 |
| NKG2A438 | AATGCTTTACCTTTGCAGTGA | 21 | AsCpf1 | 609 |
| NKG2A439 | CCTTTGCAGTGATAGGTTTTG | 21 | AsCpf1 | 610 |
| NKG2A440 | CAGTGATAGGTTTTGTCATTC | 21 | AsCpf1 | 611 |
| NKG2A441 | AAGGGAATGACAAAACCTATC | 21 | AsCpf1 | 612 |
| NKG2A442 | CAAGGGAATGACAAAACCTAT | 21 | AsCpf1 | 613 |
| NKG2A443 | GTCATTCCCTTGAAAATCCTG | 21 | AsCpf1 | 614 |
| NKG2A444 | TCATTCCCTTGAAAATCCTGA | 21 | AsCpf1 | 615 |
| NKG2A445 | TGAAGGTTTAATTCCGCATAG | 21 | AsCpf1 | 616 |
| NKG2A446 | GAAGGTTTAATTCCGCATAGG | 21 | AsCpf1 | 617 |
| NKG2A447 | AAGGTTTAATTCCGCATAGGT | 21 | AsCpf1 | 618 |
| NKG2A448 | ATTCCGCATAGGTTATTTCCT | 21 | AsCpf1 | 619 |
| NKG2A449 | GCAACTGAACAGGAAATAACC | 21 | AsCpf1 | 620 |
| NKG2A450 | AGCAACTGAACAGGAAATAAC | 21 | AsCpf1 | 621 |
| NKG2A451 | CTGTTCAGTTGCTAAAATGGA | 21 | AsCpf1 | 622 |
| NKG2A452 | TATTGCCTTTAGGTTTTCGTT | 21 | AsCpf1 | 623 |
| NKG2A453 | ATTGCCTTTAGGTTTTCGTTG | 21 | AsCpf1 | 624 |
| NKG2A454 | TTGCCTTTAGGTTTTCGTTGC | 21 | AsCpf1 | 625 |
| NKG2A455 | GGTTTTCGTTGCTGCCTCTTT | 21 | AsCpf1 | 626 |
| NKG2A456 | CGTTGCTGCCTCTTTGGGTTT | 21 | AsCpf1 | 627 |
| NKG2A457 | GTTGCTGCCTCTTTGGGTTTG | 21 | AsCpf1 | 628 |
| NKG2A458 | GGTTTGGGGGCAGATTCAGGT | 21 | AsCpf1 | 629 |
| NKG2A459 | GGGGCAGATTCAGGTCTGAGT | 21 | AsCpf1 | 630 |
| NKG2A460 | GCAACTGAACAGGAAATAACC | 21 | Cas12a | 1176 |

[0553] In some embodiments, the gRNA for use in the disclosure is a gRNA targeting TIGIT (TIGIT gRNA). In some embodiments, the gRNA targeting TIGIT is one or more of the gRNAs described in Table 11.

TABLE 11
Exemplary TIGIT gRNAs

| | gRNA Targeting Domain | | | SEQ ID |
|---|---|---|---|---|
| Name | Sequence (DNA) | Length | Enzyme | NO: |
| TIGIT4170 | TCTGCAGAAATGTTCCCCGT | 20 | AsCpf1 | 631 |
| TIGIT4171 | TGCAGAGAAAGGTGGCTCTA | 20 | AsCpf1 | 632 |
| TIGIT4172 | TAATGCTGACTTGGGGTGGC | 20 | AsCpf1 | 633 |
| TIGIT4173 | TAGGACCTCCAGGAAGATTC | 20 | AsCpf1 | 634 |
| TIGIT4174 | TAGTCAACGCGACCACCACG | 20 | AsCpf1 | 635 |
| TIGIT4175 | TCCTGAGGTCACCTTCCACA | 20 | AsCpf1 | 636 |
| TIGIT4176 | TATTGTGCCTGTCATCATTC | 20 | AsCpf1 | 637 |
| TIGIT4177 | TGACAGGCACAATAGAAACAA | 21 | SauCas9 | 638 |
| TIGIT4178 | GACAGGCACAATAGAAACAAC | 21 | SauCas9 | 639 |
| TIGIT4179 | AAACAACGGGGAACATTTCTG | 21 | SauCas9 | 640 |
| TIGIT4180 | ACAACGGGGAACATTTCTGCA | 21 | SauCas9 | 641 |
| TIGIT4181 | TGATAGAGCCACCTTTCTCTG | 21 | SauCas9 | 642 |
| TIGIT4182 | GGGTCACTTGTGCCGTGGTGG | 21 | SauCas9 | 643 |
| TIGIT4183 | GGCACAAGTGACCCAGGTCAA | 21 | SauCas9 | 644 |
| TIGIT4184 | GTCCTGCTGCTCCCAGTTGAC | 21 | SauCas9 | 645 |
| TIGIT4185 | TGGCCATTTGTAATGCTGACT | 21 | SauCas9 | 646 |
| TIGIT4186 | TGGCACATCTCCCCATCCTTC | 21 | SauCas9 | 647 |
| TIGIT4187 | CATCTCCCCATCCTTCAAGGA | 21 | SauCas9 | 648 |
| TIGIT4188 | CCACTCGATCCTTGAAGGATG | 21 | SauCas9 | 649 |
| TIGIT4189 | GGCCACTCGATCCTTGAAGGA | 21 | SauCas9 | 650 |
| TIGIT4190 | CCTGGGGCCACTCGATCCTTG | 21 | SauCas9 | 651 |
| TIGIT4191 | GACTGGAGGGTGAGGCCCAGG | 21 | SauCas9 | 652 |
| TIGIT4192 | ATCGTTCACGGTCAGCGACTG | 21 | SauCas9 | 653 |
| TIGIT4193 | GTCGCTGACCGTGAACGATAC | 21 | SauCas9 | 654 |
| TIGIT4194 | CGCTGACCGTGAACGATACAG | 21 | SauCas9 | 655 |
| TIGIT4195 | GCATCTATCACACCTACCCTG | 21 | SauCas9 | 656 |
| TIGIT4196 | CCTACCCTGATGGGACGTACA | 21 | SauCas9 | 657 |
| TIGIT4197 | TACCCTGATGGGACGTACACT | 21 | SauCas9 | 658 |
| TIGIT4198 | CCCTGATGGGACGTACACTGG | 21 | SauCas9 | 659 |
| TIGIT4199 | TTCTCCCAGTGTACGTCCCAT | 21 | SauCas9 | 660 |
| TIGIT4200 | GGAGAATCTTCCTGGAGGTCC | 21 | SauCas9 | 661 |
| TIGIT4201 | CATGGCTCCAAGCAATGGAAT | 21 | SauCas9 | 662 |
| TIGIT4202 | CGCGGCCATGGCTCCAAGCAA | 21 | SauCas9 | 663 |
| TIGIT4203 | TCGCGGCCATGGCTCCAAGCA | 21 | SauCas9 | 664 |
| TIGIT4204 | CATCGTGGTGGTCGCGTTGAC | 21 | SauCas9 | 665 |
| TIGIT4205 | AAAGCCCTCAGAATCCATTCT | 21 | SauCas9 | 666 |
| TIGIT4206 | CATTCTGTGGAAGGTGACCTC | 21 | SauCas9 | 667 |
| TIGIT4207 | TTCTGTGGAAGGTGACCTCAG | 21 | SauCas9 | 668 |
| TIGIT4208 | CCTGAGGTCACCTTCCACAGA | 21 | SauCas9 | 669 |
| TIGIT4209 | TTCTCCTGAGGTCACCTTCCA | 21 | SauCas9 | 670 |
| TIGIT4210 | AGGAGAAAATCAGCTGGACAG | 21 | SauCas9 | 671 |
| TIGIT4211 | GGAGAAAATCAGCTGGACAGG | 21 | SauCas9 | 672 |
| TIGIT4212 | GCCCCAGTGCTCCCTCACCCC | 21 | SauCas9 | 673 |
| TIGIT4213 | TGGACACAGCTTCCTGGGGGT | 21 | SauCas9 | 674 |
| TIGIT4214 | TCTGCCTGGACACAGCTTCCT | 21 | SauCas9 | 675 |
| TIGIT4215 | AGCTGCACCTGCTGGGCTCTG | 21 | SauCas9 | 676 |
| TIGIT4216 | GCTGGGCTCTGTGGAGAGCAG | 21 | SauCas9 | 677 |
| TIGIT4217 | TGGGCTCTGTGGAGAGCAGCG | 21 | SauCas9 | 678 |
| TIGIT4218 | CTGCATGACTACTTCAATGTC | 21 | SauCas9 | 679 |
| TIGIT4219 | AATGTCCTGAGTTACAGAAGC | 21 | SauCas9 | 680 |
| TIGIT4220 | TGGGTAACTGCAGCTTCTTCA | 21 | SauCas9 | 681 |
| TIGIT4221 | GACAGGCACAATAGAAACAA | 20 | SpyCas9 | 682 |
| TIGIT4222 | ACAGGCACAATAGAAACAAC | 20 | SpyCas9 | 683 |
| TIGIT4223 | CAGGCACAATAGAAACAACG | 20 | SpyCas9 | 684 |
| TIGIT4224 | GGGAACATTTCTGCAGAGAA | 20 | SpyCas9 | 685 |
| TIGIT4225 | AACATTTCTGCAGAGAAAGG | 20 | SpyCas9 | 686 |
| TIGIT4226 | ATGTCACCTCTCCTCCACCA | 20 | SpyCas9 | 687 |
| TIGIT4227 | CTTGTGCCGTGGTGGAGGAG | 20 | SpyCas9 | 688 |
| TIGIT4228 | GGTCACTTGTGCCGTGGTGG | 20 | SpyCas9 | 689 |
| TIGIT4229 | CACCACGGCACAAGTGACCC | 20 | SpyCas9 | 690 |
| TIGIT4230 | CTGGGTCACTTGTGCCGTGG | 20 | SpyCas9 | 691 |
| TIGIT4231 | GACCTGGGTCACTTGTGCCG | 20 | SpyCas9 | 692 |
| TIGIT4232 | CACAAGTGACCCAGGTCAAC | 20 | SpyCas9 | 693 |
| TIGIT4233 | ACAAGTGACCCAGGTCAACT | 20 | SpyCas9 | 694 |
| TIGIT4234 | CCAGGTCAACTGGGAGCAGC | 20 | SpyCas9 | 695 |
| TIGIT4235 | CTGCTGCTCCCAGTTGACCT | 20 | SpyCas9 | 696 |
| TIGIT4236 | CCTGCTGCTCCCAGTTGACC | 20 | SpyCas9 | 697 |
| TIGIT4237 | GGAGCAGCAGGACCAGCTTC | 20 | SpyCas9 | 698 |
| TIGIT4238 | CATTACAAATGGCCAGAAGC | 20 | SpyCas9 | 699 |
| TIGIT4239 | GGCCATTTGTAATGCTGACT | 20 | SpyCas9 | 700 |
| TIGIT4240 | GCCATTTGTAATGCTGACTT | 20 | SpyCas9 | 701 |
| TIGIT4241 | CCATTTGTAATGCTGACTTG | 20 | SpyCas9 | 702 |
| TIGIT4242 | TTTGTAATGCTGACTTGGGG | 20 | SpyCas9 | 703 |
| TIGIT4243 | CCCCAAGTCAGCATTACAAA | 20 | SpyCas9 | 704 |
| TIGIT4244 | GCACATCTCCCCATCCTTCA | 20 | SpyCas9 | 705 |
| TIGIT4245 | CCCATCCTTCAAGGATCGAG | 20 | SpyCas9 | 706 |
| TIGIT4246 | CACTCGATCCTTGAAGGATG | 20 | SpyCas9 | 707 |
| TIGIT4247 | CCACTCGATCCTTGAAGGAT | 20 | SpyCas9 | 708 |
| TIGIT4248 | GCCACTCGATCCTTGAAGGA | 20 | SpyCas9 | 709 |
| TIGIT4249 | TTCAAGGATCGAGTGGCCCC | 20 | SpyCas9 | 710 |
| TIGIT4250 | TGGGGCCACTCGATCCTTGA | 20 | SpyCas9 | 711 |
| TIGIT4251 | GATCGAGTGGCCCCAGGTCC | 20 | SpyCas9 | 712 |
| TIGIT4252 | AGTGGCCCCAGGTCCCGGCC | 20 | SpyCas9 | 713 |
| TIGIT4253 | GTGGCCCCAGGTCCCGGCCT | 20 | SpyCas9 | 714 |
| TIGIT4254 | GAGGCCCAGGCCGGGACCTG | 20 | SpyCas9 | 715 |
| TIGIT4255 | TGAGGCCCAGGCCGGGACCT | 20 | SpyCas9 | 716 |
| TIGIT4256 | GTGAGGCCCAGGCCGGGACC | 20 | SpyCas9 | 717 |
| TIGIT4257 | TGGAGGGTGAGGCCCAGGCC | 20 | SpyCas9 | 718 |
| TIGIT4258 | CTGGAGGGTGAGGCCCAGGC | 20 | SpyCas9 | 719 |
| TIGIT4259 | GCGACTGGAGGGTGAGGCCC | 20 | SpyCas9 | 720 |
| TIGIT4260 | CGGTCAGCGACTGGAGGGTG | 20 | SpyCas9 | 721 |
| TIGIT4261 | GTTCACGGTCAGCGACTGGA | 20 | SpyCas9 | 722 |
| TIGIT4262 | CGTTCACGGTCAGCGACTGG | 20 | SpyCas9 | 723 |
| TIGIT4263 | TATCGTTCACGGTCAGCGAC | 20 | SpyCas9 | 724 |
| TIGIT4264 | TCGCTGACCGTGAACGATAC | 20 | SpyCas9 | 725 |
| TIGIT4265 | CGCTGACCGTGAACGATACA | 20 | SpyCas9 | 726 |
| TIGIT4266 | GCTGACCGTGAACGATACAG | 20 | SpyCas9 | 727 |
| TIGIT4267 | GTACTCCCCTGTATCGTTCA | 20 | SpyCas9 | 728 |
| TIGIT4268 | ATCTATCACACCTACCCTGA | 20 | SpyCas9 | 729 |
| TIGIT4269 | TCTATCACACCTACCCTGAT | 20 | SpyCas9 | 730 |
| TIGIT4270 | TACCCTGATGGGACGTACAC | 20 | SpyCas9 | 731 |
| TIGIT4271 | ACCCTGATGGGACGTACACT | 20 | SpyCas9 | 732 |
| TIGIT4272 | AGTGTACGTCCCATCAGGGT | 20 | SpyCas9 | 733 |
| TIGIT4273 | TCCCAGTGTACGTCCCATCA | 20 | SpyCas9 | 734 |
| TIGIT4274 | CTCCCAGTGTACGTCCCATC | 20 | SpyCas9 | 735 |
| TIGIT4275 | GTACACTGGGAGAATCTTCC | 20 | SpyCas9 | 736 |
| TIGIT4276 | CACTGGGAGAATCTTCCTGG | 20 | SpyCas9 | 737 |
| TIGIT4277 | CTGAGCTTTCTAGGACCTCC | 20 | SpyCas9 | 738 |
| TIGIT4278 | AGGTTCCAGATTCCATTGCT | 20 | SpyCas9 | 739 |
| TIGIT4279 | AAGCAATGGAATCTGGAACC | 20 | SpyCas9 | 740 |
| TIGIT4280 | GATTCCATTGCTTGGAGCCA | 20 | SpyCas9 | 741 |
| TIGIT4281 | TGGCTCCAAGCAATGGAATC | 20 | SpyCas9 | 742 |
| TIGIT4282 | GCGGCCATGGCTCCAAGCAA | 20 | SpyCas9 | 743 |
| TIGIT4283 | TGGAGCCATGGCCGCGACGC | 20 | SpyCas9 | 744 |
| TIGIT4284 | AGCCATGGCCGCGACGCTGG | 20 | SpyCas9 | 745 |
| TIGIT4285 | GACCACCAGCGTCGCGGCCA | 20 | SpyCas9 | 746 |
| TIGIT4286 | GCAGATGACCACCAGCGTCG | 20 | SpyCas9 | 747 |
| TIGIT4287 | CATCTGCACAGCAGTCATCG | 20 | SpyCas9 | 748 |
| TIGIT4288 | CTGCACAGCAGTCATCGTGG | 20 | SpyCas9 | 749 |
| TIGIT4289 | AGCCCTCAGAATCCATTCTG | 20 | SpyCas9 | 750 |
| TIGIT4290 | CTCAGAATCCATTCTGTGGA | 20 | SpyCas9 | 751 |
| TIGIT4291 | TTCCACAGAATGGATTCTGA | 20 | SpyCas9 | 752 |
| TIGIT4292 | CTTCCACAGAATGGATTCTG | 20 | SpyCas9 | 753 |
| TIGIT4293 | ATTCTGTGGAAGGTGACCTC | 20 | SpyCas9 | 754 |
| TIGIT4294 | TGAGGTCACCTTCCACAGAA | 20 | SpyCas9 | 755 |
| TIGIT4295 | GACCTCAGGAGAAAATCAGC | 20 | SpyCas9 | 756 |
| TIGIT4296 | CAGGAGAAAATCAGCTGGAC | 20 | SpyCas9 | 757 |
| TIGIT4297 | GTCCAGCTGATTTTCTCCTG | 20 | SpyCas9 | 758 |
| TIGIT4298 | GAGAAAATCAGCTGGACAGG | 20 | SpyCas9 | 759 |
| TIGIT4299 | AATCAGCTGGACAGGAGGAA | 20 | SpyCas9 | 760 |
| TIGIT4300 | CCCAGTGCTCCCTCACCCCC | 20 | SpyCas9 | 761 |
| TIGIT4301 | CTGGGGGTGAGGGAGCACTG | 20 | SpyCas9 | 762 |
| TIGIT4302 | CCTGGGGGTGAGGGAGCACT | 20 | SpyCas9 | 763 |
| TIGIT4303 | TCCTGGGGGTGAGGGAGCAC | 20 | SpyCas9 | 764 |
| TIGIT4304 | ACACAGCTTCCTGGGGGTGA | 20 | SpyCas9 | 765 |
| TIGIT4305 | GACACAGCTTCCTGGGGGTG | 20 | SpyCas9 | 766 |
| TIGIT4306 | ACCCCCAGGAAGCTGTGTCC | 20 | SpyCas9 | 767 |
| TIGIT4307 | GCCTGGACACAGCTTCCTGG | 20 | SpyCas9 | 768 |
| TIGIT4308 | TGCCTGGACACAGCTTCCTG | 20 | SpyCas9 | 769 |
| TIGIT4309 | CTGCCTGGACACAGCTTCCT | 20 | SpyCas9 | 770 |
| TIGIT4310 | TCTGCCTGGACACAGCTTCC | 20 | SpyCas9 | 771 |
| TIGIT4311 | CAGGCAGAAGCTGCACCTGC | 20 | SpyCas9 | 772 |
| TIGIT4312 | AGGCAGAAGCTGCACCTGCT | 20 | SpyCas9 | 773 |
| TIGIT4313 | CAGCAGGTGCAGCTTCTGCC | 20 | SpyCas9 | 774 |
| TIGIT4314 | GCTGCACCTGCTGGGCTCTG | 20 | SpyCas9 | 775 |
| TIGIT4315 | TGCTCTCCACAGAGCCCAGC | 20 | SpyCas9 | 776 |
| TIGIT4316 | CTGGGCTCTGTGGAGAGCAG | 20 | SpyCas9 | 777 |
| TIGIT4317 | TGGGCTCTGTGGAGAGCAGC | 20 | SpyCas9 | 778 |
| TIGIT4318 | GGGCTCTGTGGAGAGCAGCG | 20 | SpyCas9 | 779 |
| TIGIT4319 | CTGTGGAGAGCAGCGGGGAG | 20 | SpyCas9 | 780 |
| TIGIT4320 | ATTGAAGTAGTCATGCAGCT | 20 | SpyCas9 | 781 |
| TIGIT4321 | TGTCCTGAGTTACAGAAGCC | 20 | SpyCas9 | 782 |
| TIGIT4322 | GTCCTGAGTTACAGAAGCCT | 20 | SpyCas9 | 783 |
| TIGIT4323 | TACCCAGGCTTCTGTAACTC | 20 | SpyCas9 | 784 |
| TIGIT4324 | TGAAGAAGCTGCAGTTACCC | 20 | SpyCas9 | 785 |
| TIGIT4325 | TGCAGCTTCTTCACAGAGAC | 20 | SpyCas9 | 786 |
| TIGIT5053 | GTTGTTTCTATTGTGCCTGT | 20 | AsCpf1 RR | 787 |
| TIGIT5054 | CGTTGTTTCTATTGTGCCTG | 20 | AsCpf1 RR | 788 |
| TIGIT5055 | CCGTTGTTTCTATTGTGCCT | 20 | AsCpf1 RR | 789 |
| TIGIT5056 | CCACGGCACAAGTGACCCAG | 20 | AsCpf1 RR | 790 |
| TIGIT5057 | AGTTGACCTGGGTCACTTGT | 20 | AsCpf1 RR | 791 |
| TIGIT5058 | AAGTCAGCATTACAAATGGC | 20 | AsCpf1 RR | 792 |
| TIGIT5059 | CATCCTTCAAGGATCGAGTG | 20 | AsCpf1 RR | 793 |
| TIGIT5060 | ATCCTTCAAGGATCGAGTGG | 20 | AsCpf1 RR | 794 |
| TIGIT5061 | AGGATCGAGTGGCCCCAGGT | 20 | AsCpf1 RR | 795 |
| TIGIT5062 | AGGTCCCGGCCTGGGCCTCA | 20 | AsCpf1 RR | 796 |
| TIGIT5063 | GGCCTGGGCCTCACCCTCCA | 20 | AsCpf1 RR | 797 |
| TIGIT5064 | CGGTCAGCGACTGGAGGGTG | 20 | AsCpf1 RR | 798 |
| TIGIT5065 | GTCGCTGACCGTGAACGATA | 20 | AsCpf1 RR | 799 |
| TIGIT5066 | TGTATCGTTCACGGTCAGCG | 20 | AsCpf1 RR | 800 |
| TIGIT5067 | CTGTATCGTTCACGGTCAGC | 20 | AsCpf1 RR | 801 |
| TIGIT5068 | ATCAGGGTAGGTGTGATAGA | 20 | AsCpf1 RR | 802 |
| TIGIT5069 | AGTGTACGTCCCATCAGGGT | 20 | AsCpf1 RR | 803 |
| TIGIT5070 | GGAAGATTCTCCCAGTGTAC | 20 | AsCpf1 RR | 804 |
| TIGIT5071 | TGGAGGTCCTAGAAAGCTCA | 20 | AsCpf1 RR | 805 |
| TIGIT5072 | AGCAATGGAATCTGGAACCT | 20 | AsCpf1 RR | 806 |
| TIGIT5073 | AGATTCCATTGCTTGGAGCC | 20 | AsCpf1 RR | 807 |
| TIGIT5074 | GATTCCATTGCTTGGAGCCA | 20 | AsCpf1 RR | 808 |
| TIGIT5075 | ATTGCTTGGAGCCATGGCCG | 20 | AsCpf1 RR | 809 |
| TIGIT5076 | TTGCTTGGAGCCATGGCCGC | 20 | AsCpf1 RR | 810 |
| TIGIT5077 | CAGAATGGATTCTGAGGGCT | 20 | AsCpf1 RR | 811 |
| TIGIT5078 | ACAGAATGGATTCTGAGGGC | 20 | AsCpf1 RR | 812 |
| TIGIT5079 | TTCTGTGGAAGGTGACCTCA | 20 | AsCpf1 RR | 813 |
| TIGIT5080 | GCTGATTTTCTCCTGAGGTC | 20 | AsCpf1 RR | 814 |
| TIGIT5081 | TCCTGTCCAGCTGATTTTCT | 20 | AsCpf1 RR | 815 |
| TIGIT5082 | TTCCTCCTGTCCAGCTGATT | 20 | AsCpf1 RR | 816 |
| TIGIT5083 | TGGGGGTGAGGGAGCACTGG | 20 | AsCpf1 RR | 817 |
| TIGIT5084 | AGTGCTCCCTCACCCCCAGG | 20 | AsCpf1 RR | 818 |
| TIGIT5085 | TCACCCCCAGGAAGCTGTGT | 20 | AsCpf1 RR | 819 |
| TIGIT5086 | CAGGAAGCTGTGTCCAGGCA | 20 | AsCpf1 RR | 820 |
| TIGIT5087 | AGGAAGCTGTGTCCAGGCAG | 20 | AsCpf1 RR | 821 |
| TIGIT5088 | GGCAGAAGCTGCACCTGCTG | 20 | AsCpf1 RR | 822 |
| TIGIT5089 | CAGAGCCCAGCAGGTGCAGC | 20 | AsCpf1 RR | 823 |
| TIGIT5090 | GCTGCTCTCCACAGAGCCCA | 20 | AsCpf1 RR | 824 |
| TIGIT5091 | CGCTGCTCTCCACAGAGCCC | 20 | AsCpf1 RR | 825 |
| TIGIT5092 | ATGTCCTGAGTTACAGAAGC | 20 | AsCpf1 RR | 826 |
| TIGIT5093 | TGCAGAGAAAGGTGGCTCTAT | 21 | Cas12a | 1175 |

[0554] In some embodiments the gRNA for use in the disclosure is a gRNA targeting ADORA2a (ADORA2a gRNA). In some embodiments, the gRNA targeting ADORA2a is one or more of the gRNAs described in Table 12.

TABLE 12
Exemplary ADORA2a gRNAs

| | gRNA Targeting Domain | | | SEQ ID |
|---|---|---|---|---|
| Name | Sequence (DNA) | Length | Enzyme | NO: |
| ADORA2A337 | GAGCACACCCACTGCGATGT | 20 | SpyCas9 | 827 |
| ADORA2A338 | GATGGCCAGGAGACTGAAGA | 20 | SpyCas9 | 828 |
| ADORA2A339 | CTGCTCACCGGAGCGGGATG | 20 | SpyCas9 | 829 |
| ADORA2A340 | GTCTGTGGCCATGCCCATCA | 20 | SpyCas9 | 830 |
| ADORA2A341 | TCACCGGAGCGGGATGCGGA | 20 | SpyCas9 | 831 |
| ADORA2A342 | GTGGCAGGCAGCGCAGAACC | 20 | SpyCas9 | 832 |
| ADORA2A343 | AGCACACCAGCACATTGCCC | 20 | SpyCas9 | 833 |
| ADORA2A344 | CAGGTTGCTGTTGAGCCACA | 20 | SpyCas9 | 834 |
| ADORA2A345 | CTTCATTGCCTGCTTCGTCC | 20 | SpyCas9 | 835 |
| ADORA2A346 | GTACACCGAGGAGCCCATGA | 20 | SpyCas9 | 836 |
| ADORA2A347 | GATGGCAATGTAGCGGTCAA | 20 | SpyCas9 | 837 |
| ADORA2A348 | CTCCTCGGTGTACATCACGG | 20 | SpyCas9 | 838 |
| ADORA2A349 | CGAGGAGCCCATGATGGGCA | 20 | SpyCas9 | 839 |
| ADORA2A350 | GGGCTCCTCGGTGTACATCA | 20 | SpyCas9 | 840 |
| ADORA2A351 | CTTTGTGGTGTCACTGGCGG | 20 | SpyCas9 | 841 |
| ADORA2A352 | CCGCTCCGGTGAGCAGGGCC | 20 | SpyCas9 | 842 |
| ADORA2A353 | GGGTTCTGCGCTGCCTGCCA | 20 | SpyCas9 | 843 |
| ADORA2A354 | GGACGAAGCAGGCAATGAAG | 20 | SpyCas9 | 844 |
| ADORA2A355 | GTGCTGATGGTGATGGCAAA | 20 | SpyCas9 | 845 |
| ADORA2A356 | AGCGCAGAACCCGGTGCTGA | 20 | SpyCas9 | 846 |
| ADORA2A357 | GAGCTCCATCTTCAGTCTCC | 20 | SpyCas9 | 847 |
| ADORA2A358 | TGCTGATGGTGATGGCAAAG | 20 | SpyCas9 | 848 |
| ADORA2A359 | GGCGGCGGCCGACATCGCAG | 20 | SpyCas9 | 849 |
| ADORA2A360 | AATGAAGAGGCAGCCGTGGC | 20 | SpyCas9 | 850 |
| ADORA2A361 | GGGCAATGTGCTGGTGTGCT | 20 | SpyCas9 | 851 |
| ADORA2A362 | CATGCCCATCATGGGCTCCT | 20 | SpyCas9 | 852 |
| ADORA2A363 | AATGTAGCGGTCAATGGCGA | 20 | SpyCas9 | 853 |
| ADORA2A364 | AGTAGTTGGTGACGTTCTGC | 20 | SpyCas9 | 854 |
| ADORA2A365 | AGCGGTCAATGGCGATGGCC | 20 | SpyCas9 | 855 |
| ADORA2A366 | CGCATCCCGCTCCGGTGAGC | 20 | SpyCas9 | 856 |
| ADORA2A367 | GCATCCCGCTCCGGTGAGCA | 20 | SpyCas9 | 857 |
| ADORA2A368 | TGGGCAATGTGCTGGTGTGC | 20 | SpyCas9 | 858 |
| ADORA2A369 | CAACTACTTTGTGGTGTCAC | 20 | SpyCas9 | 859 |
| ADORA2A370 | CGCTCCGGTGAGCAGGGCCG | 20 | SpyCas9 | 860 |
| ADORA2A371 | GATGGTGATGGCAAAGGGGA | 20 | SpyCas9 | 861 |
| ADORA2A372 | GGTGTACATCACGGTGGAGC | 20 | SpyCas9 | 862 |
| ADORA2A373 | GAACGTCACCAACTACTTTG | 20 | SpyCas9 | 863 |
| ADORA2A374 | CAGTGACACCACAAAGTAGT | 20 | SpyCas9 | 864 |
| ADORA2A375 | GGCCATCCTGGGCAATGTGC | 20 | SpyCas9 | 865 |
| ADORA2A376 | CCCGGCCCTGCTCACCGGAG | 20 | SpyCas9 | 866 |
| ADORA2A377 | CACCAGCACATTGCCCAGGA | 20 | SpyCas9 | 867 |
| ADORA2A378 | TTTGCCATCACCATCAGCAC | 20 | SpyCas9 | 868 |
| ADORA2A379 | CTCCACCGTGATGTACACCG | 20 | SpyCas9 | 869 |
| ADORA2A380 | GGAGCTGGCCATTGCTGTGC | 20 | SpyCas9 | 870 |
| ADORA2A381 | CAGGATGGCCAGCACAGCAA | 20 | SpyCas9 | 871 |
| ADORA2A382 | GAACCCGGTGCTGATGGTGA | 20 | SpyCas9 | 872 |
| ADORA2A383 | TGGAGCTCTGCGTGAGGACC | 20 | SpyCas9 | 873 |
| ADORA2A384 | CCCGCTCCGGTGAGCAGGGC | 20 | SpyCas9 | 874 |
| ADORA2A385 | AGGCAATGAAGAGGCAGCCG | 20 | SpyCas9 | 875 |
| ADORA2A386 | CCGGCCCTGCTCACCGGAGC | 20 | SpyCas9 | 876 |
| ADORA2A387 | GCGGCGGCCGACATCGCAGT | 20 | SpyCas9 | 877 |
| ADORA2A388 | GGTGCTGATGGTGATGGCAA | 20 | SpyCas9 | 878 |
| ADORA2A389 | CTACTTTGTGGTGTCACTGG | 20 | SpyCas9 | 879 |
| ADORA2A390 | TACACCGAGGAGCCCATGAT | 20 | SpyCas9 | 880 |
| ADORA2A391 | TCTGTGGCCATGCCCATCAT | 20 | SpyCas9 | 881 |
| ADORA2A392 | ATTGCTGTGCTGGCCATCCT | 20 | SpyCas9 | 882 |
| ADORA2A393 | CGTGAGGACCAGGACGAAGC | 20 | SpyCas9 | 883 |
| ADORA2A394 | TTGCCATCACCATCAGCACC | 20 | SpyCas9 | 884 |
| ADORA2A395 | GGATGCGGATGGCAATGTAG | 20 | SpyCas9 | 885 |
| ADORA2A396 | TTGCCATCCGCATCCCGCTC | 20 | SpyCas9 | 886 |
| ADORA2A397 | TGAAGATGGAGCTCTGCGTG | 20 | SpyCas9 | 887 |
| ADORA2A398 | CATTGCTGTGCTGGCCATCC | 20 | SpyCas9 | 888 |
| ADORA2A399 | TGCTGGTGTGCTGGGCCGTG | 20 | SpyCas9 | 889 |
| ADORA2A820 | GGCTCCTCGGTGTACATCACG | 21 | SauCas9 | 890 |
| ADORA2A821 | GAGCTCTGCGTGAGGACCAGG | 21 | SauCas9 | 891 |
| ADORA2A822 | GATGGAGCTCTGCGTGAGGAC | 21 | SauCas9 | 892 |
| ADORA2A823 | CCAGCACACCAGCACATTGCC | 21 | SauCas9 | 893 |
| ADORA2A824 | AGGACCAGGACGAAGCAGGCA | 21 | SauCas9 | 894 |
| ADORA2A825 | TGCCATCCGCATCCCGCTCCG | 21 | SauCas9 | 895 |
| ADORA2A826 | GTGTGGCTCAACAGCAACCTG | 21 | SauCas9 | 896 |
| ADORA2A827 | AGCTCCACCGTGATGTACACC | 21 | SauCas9 | 897 |
| ADORA2A828 | GTAGCGGTCAATGGCGATGGC | 21 | SauCas9 | 898 |
| ADORA2A829 | CGGTGCTGATGGTGATGGCAA | 21 | SauCas9 | 899 |
| ADORA2A830 | CCCTGCTCACCGGAGCGGGAT | 21 | SauCas9 | 900 |
| ADORA2A831 | GTGACGTTCTGCAGGTTGCTG | 21 | SauCas9 | 901 |
| ADORA2A832 | GCTCCACCGTGATGTACACCG | 21 | SauCas9 | 902 |
| ADORA2A833 | ACTGAAGATGGAGCTCTGCGT | 21 | SauCas9 | 903 |
| ADORA2A834 | CCAGCTCCACCGTGATGTACA | 21 | SauCas9 | 904 |
| ADORA2A835 | CCTTTGCCATCACCATCAGCA | 21 | SauCas9 | 905 |
| ADORA2A836 | CCGGTGCTGATGGTGATGGCA | 21 | SauCas9 | 906 |
| ADORA2A837 | CCTGGGCAATGTGCTGGTGTG | 21 | SauCas9 | 907 |
| ADORA2A838 | AGGCAGCCGTGGCAGGCAGCG | 21 | SauCas9 | 908 |
| ADORA2A839 | GCGATGGCCAGGAGACTGAAG | 21 | SauCas9 | 909 |
| ADORA2A840 | CGATGGCCAGGAGACTGAAGA | 21 | SauCas9 | 910 |
| ADORA2A841 | TCCCGCTCCGGTGAGCAGGGC | 21 | SauCas9 | 911 |
| ADORA2A842 | TGCTTCGTCCTGGTCCTCACG | 21 | SauCas9 | 912 |
| ADORA2A843 | ACCAGGACGAAGCAGGCAATG | 21 | SauCas9 | 913 |
| ADORA2A844 | ATGTACACCGAGGAGCCCATG | 21 | SauCas9 | 914 |
| ADORA2A845 | TCGTCTGTGGCCATGCCCATC | 21 | SauCas9 | 915 |
| ADORA2A846 | TCAATGGCGATGGCCAGGAGA | 21 | SauCas9 | 916 |
| ADORA2A847 | GGTGCTGATGGTGATGGCAAA | 21 | SauCas9 | 917 |
| ADORA2A848 | TAGCGGTCAATGGCGATGGCC | 21 | SauCas9 | 918 |
| ADORA2A849 | TCCGCATCCCGCTCCGGTGAG | 21 | SauCas9 | 919 |
| ADORA2A850 | CTGGCGGCGGCCGACATCGCA | 21 | SauCas9 | 920 |
| ADORA2A851 | GCCATTGCTGTGCTGGCCATC | 21 | SauCas9 | 921 |
| ADORA2A852 | ATCCCGCTCCGGTGAGCAGGG | 21 | SauCas9 | 922 |
| ADORA2A853 | AGACTGAAGATGGAGCTCTGC | 21 | SauCas9 | 923 |
| ADORA2A854 | CCCCGGCCCTGCTCACCGGAG | 21 | SauCas9 | 924 |
| ADORA2A855 | ATGGTGATGGCAAAGGGGATG | 21 | SauCas9 | 925 |
| ADORA2A856 | GCTCCTCGGTGTACATCACGG | 21 | SauCas9 | 926 |
| ADORA2A248 | TGTCGATGGCAATAGCCAAG | 20 | SpyCas9 | 927 |
| ADORA2A249 | AGAAGTTGGTGACGTTCTGC | 20 | SpyCas9 | 928 |
| ADORA2A250 | TTCGCCATCACCATCAGCAC | 20 | SpyCas9 | 929 |
| ADORA2A251 | GAAGAAGAGGCAGCCATGGC | 20 | SpyCas9 | 930 |
| ADORA2A252 | CACAAGCACGTTACCCAGGA | 20 | SpyCas9 | 931 |
| ADORA2A253 | CAACTTCTTCGTGGTATCTC | 20 | SpyCas9 | 932 |
| ADORA2A254 | CAGGATGGCCAGCACAGCAA | 20 | SpyCas9 | 933 |
| ADORA2A255 | AATTCCACTCCGGTGAGCCA | 20 | SpyCas9 | 934 |
| ADORA2A256 | AGCGCAGAAGCCAGTGCTGA | 20 | SpyCas9 | 935 |
| ADORA2A257 | GTGCTGATGGTGATGGCGAA | 20 | SpyCas9 | 936 |
| ADORA2A258 | GGAGCTGGCCATTGCTGTGC | 20 | SpyCas9 | 937 |
| ADORA2A259 | AATAGCCAAGAGGCTGAAGA | 20 | SpyCas9 | 938 |
| ADORA2A260 | CTCCTCGGTGTACATCATGG | 20 | SpyCas9 | 939 |
| ADORA2A261 | GGACAAAGCAGGCGAAGAAG | 20 | SpyCas9 | 940 |
| ADORA2A262 | TCTGGCGGCGGCTGACATCG | 20 | SpyCas9 | 941 |
| ADORA2A263 | TGGGTAACGTGCTTGTGTGC | 20 | SpyCas9 | 942 |
| ADORA2A264 | GATGTACACCGAGGAGCCCA | 20 | SpyCas9 | 943 |
| ADORA2A265 | TAACCCCTGGCTCACCGGAG | 20 | SpyCas9 | 944 |
| ADORA2A266 | TCACCGGAGTGGAATTCGGA | 20 | SpyCas9 | 945 |
| ADORA2A267 | GCGGCGGCTGACATCGCGGT | 20 | SpyCas9 | 946 |
| ADORA2A268 | GATGGTGATGGCGAATGGGA | 20 | SpyCas9 | 947 |
| ADORA2A269 | GGCTTCTGCGCTGCCTGCCA | 20 | SpyCas9 | 948 |
| ADORA2A270 | ATTCCACTCCGGTGAGCCAG | 20 | SpyCas9 | 949 |
| ADORA2A271 | GGTGTACATCATGGTGGAGC | 20 | SpyCas9 | 950 |
| ADORA2A272 | ATTGCTGTGCTGGCCATCCT | 20 | SpyCas9 | 95 |
| ADORA2A273 | CTCCACCATGATGTACACCG | 20 | SpyCas9 | 952 |
| ADORA2A274 | GGCGGCGGCTGACATCGCGG | 20 | SpyCas9 | 953 |
| ADORA2A275 | TACACCGAGGAGCCCATGGC | 20 | SpyCas9 | 954 |
| ADORA2A276 | GGGTAACGTGCTTGTGTGCT | 20 | SpyCas9 | 955 |
| ADORA2A277 | CAGGTTGCTGTTGATCCACA | 20 | SpyCas9 | 956 |
| ADORA2A278 | TGAAGATGGAACTCTGCGTG | 20 | SpyCas9 | 957 |
| ADORA2A279 | GATGGCGATGTATCTGTCGA | 20 | SpyCas9 | 958 |
| ADORA2A280 | CTTCTTCGCCTGCTTTGTCC | 20 | SpyCas9 | 959 |
| ADORA2A281 | AGGCGAAGAAGAGGCAGCCA | 20 | SpyCas9 | 960 |
| ADORA2A282 | TGCTTGTGTGCTGGGCCGTG | 20 | SpyCas9 | 961 |
| ADORA2A283 | GAAGCCAGTGCTGATGGTGA | 20 | SpyCas9 | 962 |
| ADORA2A284 | CGTGAGGACCAGGACAAAGC | 20 | SpyCas9 | 963 |
| ADORA2A285 | TGGAACTCTGCGTGAGGACC | 20 | SpyCas9 | 964 |
| ADORA2A286 | CATTGCTGTGCTGGCCATCC | 20 | SpyCas9 | 965 |
| ADORA2A287 | TTCTCCCGCCATGGGCTCCT | 20 | SpyCas9 | 966 |
| ADORA2A288 | TGGCTCACCGGAGTGGAATT | 20 | SpyCas9 | 967 |
| ADORA2A289 | TGCTGATGGTGATGGCGAAT | 20 | SpyCas9 | 968 |
| ADORA2A290 | CTTCGTGGTATCTCTGGCGG | 20 | SpyCas9 | 969 |
| ADORA2A291 | AGCACACAAGCACGTTACCC | 20 | SpyCas9 | 970 |
| ADORA2A292 | GGGCTCCTCGGTGTACATCA | 20 | SpyCas9 | 971 |
| ADORA2A293 | GTACACCGAGGAGCCCATGG | 20 | SpyCas9 | 972 |
| ADORA2A294 | GAACGTCACCAACTTCTTCG | 20 | SpyCas9 | 973 |
| ADORA2A295 | TCGCCATCCGAATTCCACTC | 20 | SpyCas9 | 974 |
| ADORA2A296 | GAGTTCCATCTTCAGCCTCT | 20 | SpyCas9 | 975 |
| ADORA2A297 | GAATTCCACTCCGGTGAGCC | 20 | SpyCas9 | 976 |
| ADORA2A298 | CAGAGATACCACGAAGAAGT | 20 | SpyCas9 | 977 |
| ADORA2A299 | CTTCTTCGTGGTATCTCTGG | 20 | SpyCas9 | 978 |
| ADORA2A695 | CAGTGCTGATGGTGATGGCGA | 21 | SauCas9 | 979 |
| ADORA2A696 | CGAATTCCACTCCGGTGAGCC | 21 | SauCas9 | 980 |
| ADORA2A697 | CCGAATTCCACTCCGGTGAGC | 21 | SauCas9 | 981 |
| ADORA2A698 | GCTGAAGATGGAACTCTGCGT | 21 | SauCas9 | 982 |
| ADORA2A699 | CGTGCTTGTGTGCTGGGCCGT | 21 | SauCas9 | 983 |
| ADORA2A700 | GTGAGGACCAGGACAAAGCAG | 21 | SauCas9 | 984 |
| ADORA2A701 | TCGATGGCAATAGCCAAGAGG | 21 | SauCas9 | 985 |
| ADORA2A702 | CATCGACAGATACATCGCCAT | 21 | SauCas9 | 986 |
| ADORA2A703 | GTACACCGAGGAGCCCATGGC | 21 | SauCas9 | 987 |
| ADORA2A704 | GCTCCACCATGATGTACACCG | 21 | SauCas9 | 988 |
| ADORA2A705 | AAGCCAGTGCTGATGGTGATG | 21 | SauCas9 | 989 |
| ADORA2A706 | CACCGCGATGTCAGCCGCCGC | 21 | SauCas9 | 990 |
| ADORA2A707 | AGGCTGAAGATGGAACTCTGC | 21 | SauCas9 | 991 |
| ADORA2A708 | GCCGCCGCCAGAGATACCACG | 21 | SauCas9 | 992 |
| ADORA2A709 | AGCTCCACCATGATGTACACC | 21 | SauCas9 | 993 |
| ADORA2A710 | AGGCAGCCATGGCAGGCAGCG | 21 | SauCas9 | 994 |
| ADORA2A711 | CCTGGCTCACCGGAGTGGAAT | 21 | SauCas9 | 995 |
| ADORA2A712 | CCAGCTCCACCATGATGTACA | 21 | SauCas9 | 996 |
| ADORA2A713 | ACCAGGACAAAGCAGGCGAAG | 21 | SauCas9 | 997 |
| ADORA2A714 | CCTGGGTAACGTGCTTGTGTG | 21 | SauCas9 | 998 |
| ADORA2A715 | AGGACCAGGACAAAGCAGGCG | 21 | SauCas9 | 999 |
| ADORA2A716 | TCAGCCGCCGCCAGAGATACC | 21 | SauCas9 | 1000 |
| ADORA2A717 | GGCTCCTCGGTGTACATCATG | 21 | SauCas9 | 1001 |
| ADORA2A718 | CTGGCGGCGGCTGACATCGCG | 21 | SauCas9 | 1002 |
| ADORA2A719 | GATGGAACTCTGCGTGAGGAC | 21 | SauCas9 | 1003 |
| ADORA2A720 | GCTCCTCGGTGTACATCATGG | 21 | SauCas9 | 1004 |
| ADORA2A721 | TGTACACCGAGGAGCCCATGG | 21 | SauCas9 | 1005 |
| ADORA2A722 | GCCATTGCTGTGCTGGCCATC | 21 | SauCas9 | 1006 |
| ADORA2A723 | CAATAGCCAAGAGGCTGAAGA | 21 | SauCas9 | 1007 |
| ADORA2A724 | ATGGTGATGGCGAATGGGATG | 21 | SauCas9 | 1008 |
| ADORA2A725 | ATGTACACCGAGGAGCCCATG | 21 | SauCas9 | 1009 |
| ADORA2A726 | GTGTGGATCAACAGCAACCTG | 21 | SauCas9 | 1010 |
| ADORA2A727 | TGCTTTGTCCTGGTCCTCACG | 21 | SauCas9 | 1011 |
| ADORA2A728 | GTAACCCCTGGCTCACCGGAG | 21 | SauCas9 | 1012 |
| ADORA2A729 | CCAGCACACAAGCACGTTACC | 21 | SauCas9 | 1013 |
| ADORA2A730 | TATCTGTCGATGGCAATAGCC | 21 | SauCas9 | 1014 |
| ADORA2A731 | GCAATAGCCAAGAGGCTGAAG | 21 | SauCas9 | 1015 |
| ADORA2A732 | AGTGCTGATGGTGATGGCGAA | 21 | SauCas9 | 1016 |
| ADORA2A733 | ACACCGAGGAGCCCATGGCGG | 21 | SauCas9 | 1017 |
| ADORA2A734 | CGCCATCCGAATTCCACTCCG | 21 | SauCas9 | 1018 |
| ADORA2A4111 | TGGTGTCACTGGCGGCGGCC | 20 | AsCpf1 | 1019 |
| ADORA2A4112 | CCATCACCATCAGCACCGGG | 20 | AsCpf1 | 1020 |
| ADORA2A4113 | CCATCGGCCTGACTCCCATG | 20 | AsCpf1 | 1021 |
| ADORA2A4114 | GCTGACCGCAGTTGTTCCAA | 20 | AsCpf1 | 1022 |
| ADORA2A4115 | AGGATGTGGTCCCCATGAAC | 20 | AsCpf1 | 1023 |
| ADORA2A4116 | CCTGTGTGCTGGTGCCCCTG | 20 | AsCpf1 | 1024 |
| ADORA2A4117 | CGGATCTTCCTGGCGGCGCG | 20 | AsCpf1 | 1025 |
| ADORA2A4118 | CCCTCTGCTGGCTGCCCCTA | 20 | AsCpf1 | 1026 |
| ADORA2A4119 | TTCTGCCCCGACTGCAGCCA | 20 | AsCpf1 | 1027 |
| ADORA2A4120 | AAGGCAGCTGGCACCAGTGC | 20 | AsCpf1 | 1028 |
| ADORA2A4121 | TAAGGGCATCATTGCCATCTG | 21 | SauCas9 | 1029 |
| ADORA2A4122 | CGGCCTGACTCCCATGCTAGG | 21 | SauCas9 | 1030 |
| ADORA2A4123 | GCAGTTGTTCCAACCTAGCAT | 21 | SauCas9 | 1031 |
| ADORA2A4124 | CCGCAGTTGTTCCAACCTAGC | 21 | SauCas9 | 1032 |
| ADORA2A4125 | CAAGAACCACTCCCAGGGCTG | 21 | SauCas9 | 1033 |
| ADORA2A4126 | CTTGGCCCTCCCCGCAGCCCT | 21 | SauCas9 | 1034 |
| ADORA2A4127 | CACTTGGCCCTCCCCGCAGCC | 21 | SauCas9 | 1035 |
| ADORA2A4128 | GGCCAAGTGGCCTGTCTCTTT | 21 | SauCas9 | 1036 |
| ADORA2A4129 | TTCATGGGGACCACATCCTCA | 21 | SauCas9 | 1037 |
| ADORA2A4130 | TGAAGTACACCATGTAGTTCA | 21 | SauCas9 | 1038 |
| ADORA2A4131 | CTGGTGCCCCTGCTGCTCATG | 21 | SauCas9 | 1039 |
| ADORA2A4132 | GCTCATGCTGGGTGTCTATTT | 21 | SauCas9 | 1040 |
| ADORA2A4133 | CTTCAGCTGTCGTCGCGCCGC | 21 | SauCas9 | 1041 |
| ADORA2A4134 | CGCGACGACAGCTGAAGCAGA | 21 | SauCas9 | 1042 |
| ADORA2A4135 | GATGGAGAGCCAGCCTCTGCC | 21 | SauCas9 | 1043 |
| ADORA2A4136 | GCGTGGCTGCAGTCGGGGCAG | 21 | SauCas9 | 1044 |
| ADORA2A4137 | ACGATGGCCAGGTACATGAGC | 21 | SauCas9 | 1045 |
| ADORA2A4138 | CTCTCCCACACCAATTCGGTT | 21 | SauCas9 | 1046 |
| ADORA2A4139 | GATTCACAACCGAATTGGTGT | 21 | SauCas9 | 1047 |
| ADORA2A4140 | GGGATTCACAACCGAATTGGT | 21 | SauCas9 | 1048 |
| ADORA2A4141 | CGTAGATGAAGGGATTCACAA | 21 | SauCas9 | 1049 |
| ADORA2A4142 | GGATACGGTAGGCGTAGATGA | 21 | SauCas9 | 1050 |
| ADORA2A4143 | TCATCTACGCCTACCGTATCC | 21 | SauCas9 | 1051 |
| ADORA2A4144 | CGGATACGGTAGGCGTAGATG | 21 | SauCas9 | 1052 |
| ADORA2A4145 | GCGGAAGGTCTGGCGGAACTC | 21 | SauCas9 | 1053 |
| ADORA2A4146 | AATGATCTTGCGGAAGGTCTG | 21 | SauCas9 | 1054 |
| ADORA2A4147 | GACGTGGCTGCGAATGATCTT | 21 | SauCas9 | 1055 |
| ADORA2A4148 | TTGCTGCCTCAGGACGTGGCT | 21 | SauCas9 | 1056 |
| ADORA2A4149 | CAAGGCAGCTGGCACCAGTGC | 21 | SauCas9 | 1057 |
| ADORA2A4150 | CGGGCACTGGTGCCAGCTGCC | 21 | SauCas9 | 1058 |
| ADORA2A4151 | CTTGGCAGCTCATGGCAGTGA | 21 | SauCas9 | 1059 |
| ADORA2A4152 | CCGTCTCAACGGCCACCCGCC | 21 | SauCas9 | 1060 |
| ADORA2A4153 | CACACTCCTGGCGGGTGGCCG | 21 | SauCas9 | 1061 |
| ADORA2A4154 | TGCCGTTGGCCCACACTCCTG | 21 | SauCas9 | 1062 |
| ADORA2A4155 | CCATTGGGCCTCCGCTCAGGG | 21 | SauCas9 | 1063 |
| ADORA2A4156 | CATAGCCATTGGGCCTCCGCT | 21 | SauCas9 | 1064 |
| ADORA2A4157 | AATGGCTATGCCCTGGGGCTG | 21 | SauCas9 | 1065 |
| ADORA2A4158 | ATGCCCTGGGGCTGGTGAGTG | 21 | SauCas9 | 1066 |
| ADORA2A4159 | GCCCTGGGGCTGGTGAGTGGA | 21 | SauCas9 | 1067 |
| ADORA2A4160 | TGGTGAGTGGAGGGAGTGCCC | 21 | SauCas9 | 1068 |
| ADORA2A4161 | GAGGGAGTGCCCAAGAGTCCC | 21 | SauCas9 | 1069 |
| ADORA2A4162 | AGGGAGTGCCCAAGAGTCCCA | 21 | SauCas9 | 1070 |
| ADORA2A4163 | GTCTGGGAGGCCCGTGTTCCC | 21 | SauCas9 | 1071 |
| ADORA2A4164 | CATGGCTAAGGAGCTCCACGT | 21 | SauCas9 | 1072 |
| ADORA2A4165 | GAGCTCCTTAGCCATGAGCTC | 21 | SauCas9 | 1073 |
| ADORA2A4166 | GCTCCTTAGCCATGAGCTCAA | 21 | SauCas9 | 1074 |
| ADORA2A4167 | GGCCTAGATGACCCCCTGGCC | 21 | SauCas9 | 1075 |
| ADORA2A4168 | CCCCCTGGCCCAGGATGGAGC | 21 | SauCas9 | 1076 |
| ADORA2A4169 | CTCCTGCTCCATCCTGGGCCA | 21 | SauCas9 | 1077 |
| ADORA2A4416 | CCGTGATGTACACCGAGGAG | 20 | AsCpf1 RR | 1078 |
| ADORA2A4417 | CTTTGCCATCACCATCAGCA | 20 | AsCpf1 RR | 1079 |
| ADORA2A4418 | TTTGCCATCACCATCAGCAC | 20 | AsCpf1 RR | 1080 |
| ADORA2A4419 | TTGCCTGCTTCGTCCTGGTC | 20 | AsCpf1 RR | 1081 |
| ADORA2A4420 | TCCTGGTCCTCACGCAGAGC | 20 | AsCpf1 RR | 1082 |
| ADORA2A4421 | TCTTCAGTCTCCTGGCCATC | 20 | AsCpf1 RR | 1083 |
| ADORA2A4422 | GTCTCCTGGCCATCGCCATT | 20 | AsCpf1 RR | 1084 |
| ADORA2A4423 | ACCTAGCATGGGAGTCAGGC | 20 | AsCpf1 RR | 1085 |
| ADORA2A4424 | AACCTAGCATGGGAGTCAGG | 20 | AsCpf1 RR | 1086 |
| ADORA2A4425 | ATGCTAGGTTGGAACAACTG | 20 | AsCpf1 RR | 1087 |
| ADORA2A4426 | GCAGCCCTGGGAGTGGTTCT | 20 | AsCpf1 RR | 1088 |
| ADORA2A4427 | CGCAGCCCTGGGAGTGGTTC | 20 | AsCpf1 RR | 1089 |
| ADORA2A4428 | AGGGCTGCGGGGAGGGCCAA | 20 | AsCpf1 RR | 1090 |
| ADORA2A4429 | TGGGGACCACATCCTCAAAG | 20 | AsCpf1 RR | 1091 |
| ADORA2A4430 | CATGAACTACATGGTGTACT | 20 | AsCpf1 RR | 1092 |
| ADORA2A4431 | ATGAACTACATGGTGTACTT | 20 | AsCpf1 RR | 1093 |
| ADORA2A4432 | ACTTCTTTGCCTGTGTGCTG | 20 | AsCpf1 RR | 1094 |
| ADORA2A4433 | TGCTGCTCATGCTGGGTGTC | 20 | AsCpf1 RR | 1095 |
| ADORA2A4434 | CAAATAGACACCCAGCATGA | 20 | AsCpf1 RR | 1096 |
| ADORA2A4435 | GCTGTCGTCGCGCCGCCAGG | 20 | AsCpf1 RR | 1097 |
| ADORA2A4436 | TGGCGGCGCGACGACAGCTG | 20 | AsCpf1 RR | 1098 |
| ADORA2A4437 | TCTGCTTCAGCTGTCGTCGC | 20 | AsCpf1 RR | 1099 |
| ADORA2A4438 | GGCAGAGGCTGGCTCTCCAT | 20 | AsCpf1 RR | 1100 |
| ADORA2A4439 | CGGCAGAGGCTGGCTCTCCA | 20 | AsCpf1 RR | 1101 |
| ADORA2A4440 | CCGGCAGAGGCTGGCTCTCC | 20 | AsCpf1 RR | 1102 |
| ADORA2A4441 | CACTGCAGAAGGAGGTCCAT | 20 | AsCpf1 RR | 1103 |
| ADORA2A4442 | TGCTGCCAAGTCACTGGCCA | 20 | AsCpf1 RR | 1104 |
| ADORA2A4443 | ACAATGATGGCCAGTGACTT | 20 | AsCpf1 RR | 1105 |
| ADORA2A4444 | TACACATCATCAACTGCTTC | 20 | AsCpf1 RR | 1106 |
| ADORA2A4445 | CTTTCTTCTGCCCCGACTGC | 20 | AsCpf1 RR | 1107 |
| ADORA2A4446 | GACTGCAGCCACGCCCCTCT | 20 | AsCpf1 RR | 1108 |
| ADORA2A4447 | TCTCTGGCTCATGTACCTGG | 20 | AsCpf1 RR | 1109 |
| ADORA2A4448 | CAACCGAATTGGTGTGGGAG | 20 | AsCpf1 RR | 1110 |
| ADORA2A4449 | ACACCAATTCGGTTGTGAAT | 20 | AsCpf1 RR | 1111 |
| ADORA2A4450 | GTTGTGAATCCCTTCATCTA | 20 | AsCpf1 RR | 1112 |
| ADORA2A4451 | TTCATCTACGCCTACCGTAT | 20 | AsCpf1 RR | 1113 |
| ADORA2A4452 | TCTACGCCTACCGTATCCGC | 20 | AsCpf1 RR | 1114 |
| ADORA2A4453 | CGAGTTCCGCCAGACCTTCC | 20 | AsCpf1 RR | 1115 |
| ADORA2A4454 | GCCAGACCTTCCGCAAGATC | 20 | AsCpf1 RR | 1116 |
| ADORA2A4455 | CCAGACCTTCCGCAAGATCA | 20 | AsCpf1 RR | 1117 |
| ADORA2A4456 | GCAAGATCATTCGCAGCCAC | 20 | AsCpf1 RR | 1118 |
| ADORA2A4457 | CAAGATCATTCGCAGCCACG | 20 | AsCpf1 RR | 1119 |
| ADORA2A4458 | CAGCCACGTCCTGAGGCAGC | 20 | AsCpf1 RR | 1120 |
| ADORA2A4459 | AGGCAGCTGGCACCAGTGCC | 20 | AsCpf1 RR | 1121 |
| ADORA2A4460 | TCACTGCCATGAGCTGCCAA | 20 | AsCpf1 RR | 1122 |
| ADORA2A4461 | TCTCAACGGCCACCCGCCAG | 20 | AsCpf1 RR | 1123 |
| ADORA2A4462 | CTCAGGGTGGGGAGCACTGC | 20 | AsCpf1 RR | 1124 |
| ADORA2A4463 | CACCCTGAGCGGAGGCCCAA | 20 | AsCpf1 RR | 1125 |
| ADORA2A4464 | ACCCTGAGCGGAGGCCCAAT | 20 | AsCpf1 RR | 1126 |
| ADORA2A4465 | AGGGCATAGCCATTGGGCCT | 20 | AsCpf1 RR | 1127 |
| ADORA2A4466 | CTCACCAGCCCCAGGGCATA | 20 | AsCpf1 RR | 1128 |
| ADORA2A4467 | TCCACTCACCAGCCCCAGGG | 20 | AsCpf1 RR | 1129 |
| ADORA2A4468 | TGGGACTCTTGGGCACTCCC | 20 | AsCpf1 RR | 1130 |
| ADORA2A4469 | CTGGGACTCTTGGGCACTCC | 20 | AsCpf1 RR | 1131 |
| ADORA2A4470 | CCTGGGACTCTTGGGCACTC | 20 | AsCpf1 RR | 1132 |
| ADORA2A4471 | AGGGGAACACGGGCCTCCCA | 20 | AsCpf1 RR | 1133 |
| ADORA2A4472 | CGTCTGGGAGGCCCGTGTTC | 20 | AsCpf1 RR | 1134 |
| ADORA2A4473 | AGACGTGGAGCTCCTTAGCC | 20 | AsCpf1 RR | 1135 |
| ADORA2A4474 | TTGAGCTCATGGCTAAGGAG | 20 | AsCpf1 RR | 1136 |
| ADORA2A4475 | CTGGCCTAGATGACCCCCTG | 20 | AsCpf1 RR | 1137 |
| ADORA2A4476 | TGGCCTAGATGACCCCCTGG | 20 | AsCpf1 RR | 1138 |
| ADORA2A4477 | TCCTGGGCCAGGGGGTCATC | 20 | AsCpf1 RR | 1139 |
| ADORA2A4478 | CTGGCCCAGGATGGAGCAGG | 20 | AsCpf1 RR | 1140 |
| ADORA2A4479 | TGGCCCAGGATGGAGCAGGA | 20 | AsCpf1 RR | 1141 |
| ADORA2A4480 | CGCGAGTTCCGCCAGACCTT | 20 | AsCpf1 RVR | 1142 |
| ADORA2A4481 | CCCTGGGGCTGGTGAGTGGA | 20 | AsCpf1RVR | 1143 |
| ADORA2A4482 | CCATCGGCCTGACTCCCATGC | 21 | Cas12a | 1174 |

[0555] It will be understood that the exemplary gRNAs disclosed herein are provided to illustrate non-limiting embodiments embraced by the present disclosure. Additional suitable gRNA sequences will be apparent to the skilled artisan based on the present disclosure, and the disclosure is not limited in this respect.

### Methods of Characterization

[0556] Methods of characterizing cells including characterizing cellular phenotype are known to those of skill in the art. In some embodiments, one or more such methods may include, but not be limited to, for example, morphological analyses and flow cytometry. Cellular lineage and identity markers are known to those of skill in the art. One or more such markers may be combined with one or more characterization methods to determine a composition of a cell population or phenotypic identity of one or more cells. For example, in some embodiments, cells of a particular population will be characterized using flow cytometry (for example, see Ye Li et al., Cell Stem Cell. 2018 Aug. 2; 23(2): 181-192.e5). In some such embodiments, a sample of a population of cells will be evaluated for presence and proportion of one or more cell surface markers and/or one or more intracellular markers. As will be understood by those of skill in the art, such cell surface markers may be representative of different lineages. For example, pluripotent cells may be identified by one or more of any number of markers known to be associated with such cells, such as, for example, CD34. Further, in some embodiments, cells may be identified by markers that indicate some degree of differentiation. Such markers will be known to one of skill in the art. For example, in some embodiments, markers of differentiated cells may include those associated with differentiated hematopoietic cells such as, e.g., CD43, CD45 (differentiated hematopoietic cells). In some embodiments, markers of differentiated cells may be associated with NK cell phenotypes such as, e.g., CD56, NK cell receptor immunoglobulin gamma Fc region receptor III (FcγRIII, cluster of differentiation 16 (CD16)), natural killer group-2 member D (NKG2D), CD69, a natural cytotoxicity receptor, etc. In some embodiments, markers may be T cell markers (e.g., CD3, CD4, CD8, etc.).

### Methods of Use

[0557] A variety of diseases, disorders and/or conditions may be treated through use of cells provided by the present disclosure. For example, in some embodiments, a disease, disorder and/or condition may be treated by introducing genetically modified or engineered cells as described herein (e.g., genetically modified NK or iNK cells) to a subject. Examples of diseases that may be treated include, but are not limited to, cancer, e.g., solid tumors, e.g., of the brain, prostate, breast, lung, colon, uterus, skin, liver, bone, pancreas, ovary, testes, bladder, kidney, head, neck, stomach, cervix, rectum, larynx, or esophagus; and hematological malignancies, e.g., acute and chronic leukemias, lymphomas, multiple myeloma and myelodysplastic syndromes.

[0558] In some embodiments, the present disclosure provides methods of treating a subject in need thereof by administering to the subject a composition comprising any of the cells described herein. In some embodiments, a therapeutic agent or composition may be administered before, during, or after the onset of a disease, disorder, or condition (including, e.g., an injury). In some embodiments, the present disclosure provides any of the cells described herein for use in the preparation of a medicament. In some embodiments, the present disclosure provides any of the cells described herein for use in the treatment of a disease, disorder, or condition, that can be treated by a cell therapy.

[0559] In particular embodiments, the subject has a disease, disorder, or condition, that can be treated by a cell therapy. In some embodiments, a subject in need of cell therapy is a subject with a disease, disorder and/or condition, whereby a cell therapy, e.g., a therapy in which a composition comprising a cell described herein, is administered to the subject, whereby the cell therapy treats at least one symptom associated with the disease, disorder, and/or condition. In some embodiments, a subject in need of cell therapy includes, but is not limited to, a candidate for bone marrow or stem cell transplant, a subject who has received chemotherapy or irradiation therapy, a subject who has or is at risk of having cancer, e.g., a cancer of hematopoietic system, a subject having or at risk of developing a tumor, e.g., a solid tumor, and/or a subject who has or is at risk of having a viral infection or a disease associated with a viral infection.

### Pharmaceutical Compositions

[0560] In some embodiments, the present disclosure provides pharmaceutical compositions comprising one or more genetically modified or engineered cells described herein, e.g., a genetically modified NK or iNK cell described herein. In some embodiments, a pharmaceutical composition further comprises a pharmaceutically acceptable excipient. In some embodiments, a pharmaceutical composition comprises isolated pluripotent stem cell-derived hematopoietic lineage cells comprising at least 50%, 60%, 70%, 80%, 90%, 95%, 98%, or 99% T cells, NK cells, NKT cells, CD34+ HE cells or HSCs, e.g., genetically modified (e.g., edited) T cells, NK cells, NKT cells, CD34+ HE cells or HSCs. In some embodiments, a pharmaceutical composition comprises isolated pluripotent stem cell-derived hematopoietic lineage cells comprising about 95% to about 100% T cells, NK cells, NKT cells, CD34+ HE cells or HSCs, e.g., genetically modified (e.g., edited) T cells, NK cells, NKT cells, CD34+ HE cells or HSCs.

[0561] In some embodiments, a pharmaceutical composition of the present disclosure comprises an isolated population of pluripotent stem cell-derived hematopoietic lineage cells, wherein the isolated population has less than about 0.1%, 0.5%, 1%, 2%, 5%, 10%, 15%, 20%, 25%, or 30% T cells, NK cells, NKT cells, CD34+ HE cells or HSCs, e.g., genetically modified (e.g., edited) T cells, NK cells, NKT cells, CD34+ HE cells or HSCs. In some embodiments, an isolated population of pluripotent stem cell-derived hematopoietic lineage cells has more than about 0.1%, 0.5%, 1%, 2%, 5%, 10%, 15%, 20%, 25%, or 30% T cells, NK cells, NKT cells, CD34+ HE cells or HSCs, e.g., genetically modified (e.g., edited) T cells, NK cells, NKT cells, CD34+ HE cells or HSCs. In some embodiments, an isolated population of pluripotent stem cell-derived hematopoietic lineage cells has about 0.1% to about 1%, about 1% to about 3%, about 3% to about 5%, about 10%-15%, about 15%-20%, about 20%-25%, about 25%-30%, about 30%-35%, about 35%-40%, about 40%-45%, about 45%-50%, about 60%-70%, about 70%-80%, about 80%-90%, about 90%-95%, or about 95% to about 100% T cells, NK cells, NKT cells, CD34+ HE cells or HSCs, e.g., genetically modified (e.g., edited) T cells, NK cells, NKT cells, CD34+ HE cells or HSCs.

[0562] In some embodiments, an isolated population of pluripotent stem cell-derived hematopoietic lineage cells comprises about 0.1%, about 1%, about 3%, about 5%, about 10%, about 15%, about 20%, about 25%, about 30%, about 35%, about 40%, about 45%, about 50%, about 60%, about 70%, about 80%, about 90%, about 95%, about 98%, about 99%, or about 100% T cells, NK cells, NKT cells, CD34+ HE cells or HSCs, e.g., genetically modified (e.g., edited) T cells, NK cells, NKT cells, CD34+ HE cells or HSCs.

[0563] As one of ordinary skill in the art would understand, both autologous and allogeneic cells can be used in adoptive cell therapies. Autologous cell therapies generally have reduced infection, low probability for GVHD, and rapid immune reconstitution relative to other cell therapies. Allogeneic cell therapies generally have an immune mediated graft-versus-malignancy (GVM) effect, and low rate of relapse relative to other cell therapies. Based on the specific condition(s) of the subject in need of the cell therapy, one of ordinary skill in the art would be able to determine which specific type of therapy(ies) to administer.

[0564] In some embodiments, a pharmaceutical composition comprises pluripotent stem cell-derived hematopoietic lineage cells that are allogeneic to a subject. In some embodiments, a pharmaceutical composition comprises pluripotent stem cell-derived hematopoietic lineage cells that are autologous to a subject. For autologous transplantation, the isolated population of pluripotent stem cell-derived hematopoietic lineage cells can be either a complete or partial HLA-match with the subject being treated. In some embodiments, the pluripotent stem cell-derived hematopoietic lineage cells are not HLA-matched to a subject.

[0565] In some embodiments, pluripotent stem cell-derived hematopoietic lineage cells can be administered to a subject without being expanded ex vivo or in vitro prior to administration. In particular embodiments, an isolated population of derived hematopoietic lineage cells is modulated and treated ex vivo using one or more agents to obtain immune cells with improved therapeutic potential. In some embodiments, the modulated population of derived hematopoietic lineage cells can be washed to remove the treatment agent(s), and the improved population can be administered to a subject without further expansion of the population in vitro. In some embodiments, an isolated population of derived hematopoietic lineage cells is expanded prior to modulating the isolated population with one or more agents.

[0566] In some embodiments, an isolated population of derived hematopoietic lineage cells can be genetically modified according to the methods of the present disclosure to express a recombinant TCR, CAR or other gene product of interest. For genetically engineered derived hematopoietic lineage cells that express a recombinant TCR or CAR, whether prior to or after genetic modification of the cells, the cells can be activated and expanded using methods as described, for example, in U.S. Pat. Nos. 6,352,694; 6,534,055; 6,905,680; 6,692,964; 5,858,358; 6,887,466; 6,905,681; 7,144,575; 7,067,318; 7,172,869; 7,232,566; 7,175,843; 5,883,223; 6,905,874; 6,797,514; 6,867,041; and U.S. Patent Application Publication No. 20060121005.

### Cancers

[0567] Any cancer can be treated using a cell or pharmaceutical composition described herein. Exemplary therapeutic targets of the present disclosure include cancer cells from the bladder, blood, bone, bone marrow, brain, breast, colon, esophagus, eye, gastrointestinal system, gum, head, kidney, liver, lung, nasopharynx, neck, ovary, prostate, skin, stomach, testis, tongue, or uterus. In addition, a cancer may specifically be of the following non-limiting histological type: neoplasm, malignant; carcinoma; carcinoma, undifferentiated; giant and spindle cell carcinoma; small cell carcinoma; papillary carcinoma; squamous cell carcinoma; lymphoepithelial carcinoma; basal cell carcinoma; pilomatrix carcinoma; transitional cell carcinoma; papillary transitional cell carcinoma; adenocarcinoma; gastrinoma, malignant; cholangiocarcinoma; hepatocellular carcinoma; combined hepatocellular carcinoma and cholangiocarcinoma; trabecular adenocarcinoma; adenoid cystic carcinoma; adenocarcinoma in adenomatous polyp; adenocarcinoma, familial polyposis coli; solid carcinoma; carcinoid tumor, malignant; branchiolo-alveolar adenocarcinoma; papillary adenocarcinoma; chromophobe carcinoma; acidophil carcinoma; oxyphilic adenocarcinoma; basophil carcinoma; clear cell adenocarcinoma; granular cell carcinoma; follicular adenocarcinoma; papillary and follicular adenocarcinoma; nonencapsulating sclerosing carcinoma; adrenal cortical carcinoma; endometroid carcinoma; skin appendage carcinoma; apocrine adenocarcinoma; sebaceous adenocarcinoma; ceruminous adenocarcinoma; mucoepidermoid carcinoma; cystadenocarcinoma; papillary cystadenocarcinoma; papillary serous cystadenocarcinoma; mucinous cystadenocarcinoma; mucinous adenocarcinoma; signet ring cell carcinoma; infiltrating duct carcinoma; medullary carcinoma; lobular carcinoma; inflammatory carcinoma; Paget's disease, mammary; acinar cell carcinoma; adenosquamous carcinoma; adenocarcinoma w/squamous metaplasia; thymoma, malignant; ovarian stromal tumor, malignant; thecoma, malignant; granulosa cell tumor, malignant; androblastoma, malignant; sertoli cell carcinoma; Leydig cell tumor, malignant; lipid cell tumor, malignant; paraganglioma, malignant; extra-mammary paraganglioma, malignant; pheochromocytoma; glomangiosarcoma; malignant melanoma; amelanotic melanoma; superficial spreading melanoma; malig melanoma in giant pigmented nevus; epithelioid cell melanoma; blue nevus, malignant; sarcoma; fibrosarcoma; fibrous histiocytoma, malignant; myxosarcoma; liposarcoma; leiomyosarcoma; rhabdomyosarcoma; embryonal rhabdomyosarcoma; alveolar rhabdomyosarcoma; stromal sarcoma; mixed tumor, malignant; mullerian mixed tumor; nephroblastoma; hepatoblastoma; carcinosarcoma; mesenchymoma, malignant; brenner tumor, malignant; phyllodes tumor, malignant; synovial sarcoma; mesothelioma, malignant; dysgerminoma; embryonal carcinoma; teratoma, malignant; struma ovarii, malignant; choriocarcinoma; mesonephroma, malignant; hemangiosarcoma; hemangioendothelioma, malignant; Kaposi sarcoma; hemangiopericytoma, malignant; lymphangiosarcoma; osteosarcoma; juxtacortical osteosarcoma; chondrosarcoma; chondroblastoma, malignant; mesenchymal chondrosarcoma; giant cell tumor of bone; Ewing sarcoma; odontogenic tumor, malignant; ameloblastic odontosarcoma; ameloblastoma, malignant; ameloblastic fibrosarcoma; pinealoma, malignant; chordoma; glioma, malignant; ependymoma; astrocytoma; protoplasmic astrocytoma; fibrillary astrocytoma; astroblastoma; glioblastoma; oligodendroglioma; oligodendroblastoma; primitive neuroectodermal; cerebellar sarcoma; ganglioneuroblastoma; neuroblastoma; retinoblastoma; olfactory neurogenic tumor; meningioma, malignant; neurofibrosarcoma; neurilemmoma, malignant; granular cell tumor, malignant; malignant lymphoma; Hodgkin's disease; Hodgkin's lymphoma; paragranuloma; malignant lymphoma, small lymphocytic; malignant lymphoma, large cell, diffuse; malignant lymphoma, follicular; mycosis fungoides; other specified non-Hodgkin's lymphomas; malignant histiocytosis; multiple myeloma; mast cell sarcoma; immunoproliferative small intestinal disease; leukemia; lymphoid leukemia; plasma cell leukemia; erythroleukemia; lymphosarcoma cell leukemia; myeloid leukemia; basophilic leukemia; eosinophilic leukemia; monocytic leukemia; mast cell leukemia; megakaryoblastic leukemia; myeloid sarcoma; and hairy cell leukemia.

[0568] In some embodiments, the cancer is a breast cancer. In some embodiments, the cancer is colorectal cancer (e.g., colon cancer). In some embodiments, the cancer is gastric cancer. In some embodiments, the cancer is RCC. In some embodiments, the cancer is non-small cell lung cancer (NSCLC). In some embodiments, the cancer is head and neck cancer.

[0569] In some embodiments, solid cancer indications that can be treated with cells described herein (e.g., cells modified using methods of the disclosure, e.g., genetically modified iNK cells), either alone or in combination with one or more additional cancer treatment modality, include: bladder cancer, hepatocellular carcinoma, prostate cancer, ovarian/uterine cancer, pancreatic cancer, mesothelioma, melanoma, glioblastoma, HPV-associated and/or HPV-positive cancers such as cervical and HPV+ head and neck cancer, oral cavity cancer, cancer of the pharynx, thyroid cancer, gallbladder cancer, and soft tissue sarcomas. In some embodiments, hematological cancer indications that can be treated with cells described herein (e.g., cells modified using methods of the disclosure, e.g., genetically modified iNK cells), either alone or in combination with one or more additional cancer treatment modalities, include: ALL, CLL, NHL, DLBCL, AML, CML, and multiple myeloma (MM).

[0570] In some embodiments, examples of cellular proliferative and/or differentiative disorders of the lung that can be treated with cells described herein (e.g., cells modified using methods of the disclosure) include, but are not limited to, tumors such as bronchogenic carcinoma, including paraneoplastic syndromes, bronchioloalveolar carcinoma, neuroendocrine tumors, such as bronchial carcinoid, miscellaneous tumors, metastatic tumors, and pleural tumors, including solitary fibrous tumors (pleural fibroma) and malignant mesothelioma.

[0571] In some embodiments, examples of cellular proliferative and/or differentiative disorders of the breast that can be treated with cells described herein (e.g., cells modified using methods of the disclosure) include, but are not limited to, proliferative breast disease including, e.g., epithelial hyperplasia, sclerosing adenosis, and small duct papillomas; tumors, e.g., stromal tumors such as fibroadenoma, phyllodes tumor, and sarcomas, and epithelial tumors such as large duct papilloma; carcinoma of the breast including in situ (noninvasive) carcinoma that includes ductal carcinoma in situ (including Paget's disease) and lobular carcinoma in situ, and invasive (infiltrating) carcinoma including, but not limited to, invasive ductal carcinoma, invasive lobular carcinoma, medullary carcinoma, colloid (mucinous) carcinoma, tubular carcinoma, and invasive papillary carcinoma, and miscellaneous malignant neoplasms. Disorders in the male breast include, but are not limited to, gynecomastia and carcinoma.

[0572] In some embodiments, examples of cellular proliferative and/or differentiative disorders involving the colon that can be treated with cells described herein (e.g., cells modified using methods of the disclosure) include, but are not limited to, tumors of the colon, such as non-neoplastic polyps, adenomas, familial syndromes, colorectal carcinogenesis, colorectal carcinoma, and carcinoid tumors.

[0573] In some embodiments, examples of cancers or neoplastic conditions, in addition to the ones described above that can be treated with cells described herein (e.g., cells modified using methods of the disclosure), include, but are not limited to, a fibrosarcoma, myosarcoma, liposarcoma, chondrosarcoma, osteogenic sarcoma, chordoma, angiosarcoma, endotheliosarcoma, lymphangiosarcoma, lymphangioendotheliosarcoma, synovioma, mesothelioma, Ewing's tumor, leiomyosarcoma, rhabdomyosarcoma, gastric cancer, esophageal cancer, rectal cancer, pancreatic cancer, ovarian cancer, prostate cancer, uterine cancer, cancer of the head and neck, skin cancer, brain cancer, squamous cell carcinoma, sebaceous gland carcinoma, papillary carcinoma, papillary adenocarcinoma, cystadenocarcinoma, medullary carcinoma, bronchogenic carcinoma, renal cell carcinoma, hepatoma, bile duct carcinoma, choriocarcinoma, seminoma, embryonal carcinoma, Wilm's tumor, cervical cancer, testicular cancer, small cell lung carcinoma, non-small cell lung carcinoma, bladder carcinoma, epithelial carcinoma, glioma, astrocytoma, medulloblastoma, craniopharyngioma, ependymoma, pinealoma, hemangioblastoma, acoustic neuroma, oligodendroglioma, meningioma, melanoma, neuroblastoma, retinoblastoma, leukemia, lymphoma, or Kaposi sarcoma.

[0574] In some embodiments, cells described herein (e.g., cells modified using methods of the disclosure) are used in combination with one or more cancer treatment modalities. In some embodiments, other cancer treatment modalities include, but are not limited to: chemotherapeutic agents include alkylating agents such as thiotepa and CYTOXAN® cyclosphosphamide; alkyl sulfonates such as busulfan, improsulfan and piposulfan; aziridines such as benzodopa, carboquone, meturedopa, and uredopa; ethylenimines and methylamelamines including altretamine, triethylenemelamine, trietylenephosphoramide, triethiylenethiophosphoramide and trimethylolomelamine; acetogenins (especially bullatacin and bullatacinone); delta-9-tetrahydrocannabinol (dronabinol, MARINOL®); beta-lapachone; lapachol; colchicines; betulinic acid; a camptothecin (including the synthetic analogue topotecan (HYCAMTIN®), CPT-11 (irinotecan, CAMPTOSAR®), acetylcamptothecin, scopolectin, and 9-aminocamptothecin); bryostatin; callystatin; CC-1065 (including its adozelesin, carzelesin and bizelesin synthetic analogues); podophyllotoxin; podophyllinic acid; teniposide; cryptophycins (particularly cryptophycin 1 and cryptophycin 8); dolastatin; duocarmycin (including the synthetic analogues, KW-2189 and CB1-TM1); eleutherobin; pancratistatin; a sarcodictyin; spongistatin; nitrogen mustards such as chlorambucil, chlornaphazine, cholophosphamide, estramustine, ifosfanide, mechlorethamine, mechlorethamine oxide hydrochloride, melphalan, novembichin, phenesterine, prednimustine, trofosfamide, uracil mustard; nitrosureas such as carmustine, chlorozotocin, fotemustine, lomustine, nimustine, and ranimnustine; antibiotics such as the enediyne antibiotics (e.g., calicheamicin, especially calicheamicin gammalI and calicheamicin omegal1 (see, e.g., Agnew, Chem. Intl. Ed. Engl., 1994; 33:183-186); dynemicin, including dynemicin A; an esperamicin; as well as neocarzinostatin chromophore and related chromoprotein enediyne antiobiotic chromophores), aclacinomysins, actinomycin, authramycin, azaserine, bleomycins, cactinomycin, carabicin, caminomycin, carzinophilin, chromomycinis, dactinomycin, daunorubicin, detorubicin, 6-diazo-5-oxo-L-norleucine, doxorubicin (including ADRIAMYCIN®, morpholino-doxorubicin, cyanomorpholino-doxorubicin, 2-pyrrolino-doxorubicin, doxorubicin HCl liposome injection (DOXIL®) and deoxydoxorubicin), epirubicin, esorubicin, idarubicin, marcellomycin, mitomycins such as mitomycin C, mycophenolic acid, nogalamycin, olivomycins, peplomycin, potfiromycin, puromycin, quelamycin, rodorubicin, streptonigrin, streptozocin, tubercidin, ubenimex, zinostatin, zorubicin; anti-metabolites such as methotrexate, gemcitabine (GEMZAR®), tegafur (UFTORAL®), capecitabine (XELODA®), an epothilone, and 5-fluorouracil (5-FU); folic acid analogues such as denopterin, methotrexate, pteropterin, trimetrexate; purine analogs such as fludarabine, 6-mercaptopurine, thiamiprine, thioguanine; pyrimidine analogs such as ancitabine, azacitidine, 6-azauridine, carmofur, cytarabine, dideoxyuridine, doxifluridine, enocitabine, floxuridine; androgens such as calusterone, dromostanolone propionate, epitiostanol, mepitiostane, testolactone; anti-adrenals such as aminoglutethimide, mitotane, trilostane; folic acid replenisher such as frolinic acid; aceglatone; aldophosphamide glycoside; aminolevulinic acid; eniluracil; amsacrine; bestrabucil; bisantrene; edatraxate; defofamine; demecolcine; diaziquone; elformithine; elliptinium acetate; etoglucid; gallium nitrate; hydroxyurea; lentinan; lonidainine; maytansinoids such as maytansine and ansamitocins; mitoguazone; mitoxantrone; mopidanmol; nitraerine; pentostatin; phenamet; pirarubicin; losoxantrone; 2-ethylhydrazide; procarbazine; PSK® polysaccharide complex (JHS Natural Products, Eugene, Oreg.); razoxane; rhizoxin; sizofuran; spirogermanium; tenuazonic acid; triaziquone; 2,2′,2″-trichlorotriethylamine; trichothecenes (especially T-2 toxin, verracurin A, roridin A and anguidine); urethan; vindesine (ELDISINE®, FILDESIN®); dacarbazine; mannomustine; mitobronitol; mitolactol; pipobroman; gacytosine; arabinoside (“Ara-C”); thiotepa; taxoids, e.g., paclitaxel (TAXOL®), albumin-engineered nanoparticle formulation of paclitaxel (ABRAXANET™), and doxetaxel (TAXOTERE®); chloranbucil; 6-thioguanine; mercaptopurine; methotrexate; platinum analogs such as cisplatin and carboplatin; vinblastine (VELBAN®); platinum; etoposide (VP-16); ifosfamide; mitoxantrone; vincristine (ONCOVIN®); oxaliplatin; leucovovin; vinorelbine (NAVELBINE®); novantrone; edatrexate; daunomycin; aminopterin; cyclosporine, sirolimus, rapamycin, rapalogs, ibandronate; topoisomerase inhibitor RFS 2000; difluoromethylornithine (DMFO); retinoids such as retinoic acid; CHOP, an abbreviation for a combined therapy of cyclophosphamide, doxorubicin, vincristine, and prednisolone, and FOLFOX, an abbreviation for a treatment regimen with oxaliplatin (ELOXATIN™) combined with 5-FU, leucovovin; anti-estrogens and selective estrogen receptor modulators (SERMs), including, for example, tamoxifen (including NOLVADEX® tamoxifen), raloxifene (EVISTA®), droloxifene, 4-hydroxytamoxifen, trioxifene, keoxifene, LY117018, onapristone, and toremifene (FARESTON®); anti-progesterones; estrogen receptor down-regulators (ERDs); estrogen receptor antagonists such as fulvestrant (FASLODEX®); agents that function to suppress or shut down the ovaries, for example, leutinizing hormone-releasing hormone (LHRH) agonists such as leuprolide acetate (LUPRON® and ELIGARD®), goserelin acetate, buserelin acetate and tripterelin; other anti-androgens such as flutamide, nilutamide and bicalutamide; and aromatase inhibitors that inhibit the enzyme aromatase, which regulates estrogen production in the adrenal glands, such as, for example, 4(5)-imidazoles, aminoglutethimide, megestrol acetate (MEGASE®), exemestane (AROMASIN®), formestanie, fadrozole, vorozole (RIVISOR®), letrozole (FEMARA®), and anastrozole (ARIMIDEX®); bisphosphonates such as clodronate (for example, BONEFOS® or OSTAC®), etidronate (DIDROCAL®), NE-58095, zoledronic acid/zoledronate (ZOMETA®), alendronate (FOSAMAX®), pamidronate (AREDIA®), tiludronate (SKELID®), or risedronate (ACTONEL®); troxacitabine (a 1,3-dioxolane nucleoside cytosine analog); aptamers, described for example in U.S. Pat. No. 6,344,321, which is herein incorporated by reference in its entirety; anti HGF monoclonal antibodies (e.g., AV299 from Aveo, AMG102, from Amgen); truncated mTOR variants (e.g., CGEN241 from Compugen); protein kinase inhibitors that block mTOR induced pathways (e.g., ARQ197 from Arqule, XL880 from Exelexis, SGX523 from SGX Pharmaceuticals, MP470 from Supergen, PF2341066 from Pfizer); vaccines such as THERATOPE® vaccine and gene therapy vaccines, for example, ALLOVECTIN® vaccine, LEUVECTIN® vaccine, and VAXID® vaccine; topoisomerase 1 inhibitor (e.g., LURTOTECAN®); rmRH (e.g., ABARELIX®); lapatinib ditosylate (an ErbB-2 and EGFR dual tyrosine kinase small-molecule inhibitor also known as GW572016); COX-2 inhibitors such as celecoxib (CELEBREX®; 4-(5-(4-methylphenyl)-3-(trifluoromethyl)-1H-pyrazol-1-yl) benzenesulfonamide; and pharmaceutically acceptable salts, acids or derivatives of any of the above.

[0575] In some embodiments, cells described herein (e.g., cells modified using methods of the disclosure) are used in combination with one or more cancer treatment modalities that facilitate the induction of antibody dependent cellular cytotoxicity (ADCC) (see e.g., Janeway's Immunobiology by K. Murphy and C. weaver). In some embodiments, such a cancer treatment modality is an antibody. In some embodiments, such an antibody is Trastuzumab. In some embodiments, such an antibody is Rituximab. In some embodiments, such an antibody is Rituximab, Palivizumab, Infliximab, Trastuzumab, Alemtuzumab, Adalimumab, Ibritumomab tiuxetan, Omalizumab, Cetuximab, Bevacizumab, Natalizumab, Panitumumab, Ranibizumab, Certolizumab pegol, Ustekinumab, Canakinumab, Golimumab, Ofatumumab, Tocilizumab, Denosumab, Belimumab, Ipilimumab, Brentuximab vedotin, Pertuzumab, Trastuzumab emtansine, Obinutuzumab, Siltuximab, Ramucirumab, Vedolizumab, Blinatumomab, Nivolumab, Pembrolizumab, Idarucizumab, Necitumumab, Dinutuximab, Secukinumab, Mepolizumab, Alirocumab, Evolocumab, Daratumumab, Elotuzumab, Ixekizumab, Reslizumab, Olaratumab, Bezlotoxumab, Atezolizumab, Obiltoxaximab, Inotuzumab ozogamicin, Brodalumab, Guselkumab, Dupilumab, Sarilumab, Avelumab, Ocrelizumab, Emicizumab, Benralizumab, Gemtuzumab ozogamicin, Durvalumab, Burosumab, Lanadelumab, Mogamulizumab, Erenumab, Galcanezumab, Tildrakizumab, Cemiplimab, Emapalumab, Fremanezumab, Ibalizumab, Moxetumomab pasudodox, Ravulizumab, Romosozumab, Risankizumab, Polatuzumab vedotin, Brolucizumab, or any combination thereof (see e.g., Lu et al., Development of therapeutic antibodies for the treatment of diseases. Journal of Biomedical Science, 2020). In some embodiments, cells described herein (e.g., cells modified using methods of the disclosure) are used in combination with one or more cancer treatment modalities that facilitate the induction of antibody dependent cellular cytotoxicity (ADCC), wherein the cancer treatment modality is an antibody or appropriate fragment thereof targeting CD20, TNFα, HER2, CD52, IgE, EGFR, VEGF-A, ITGA4, CTLA-4, CD30, VEGFR2, α4β7 integrin, CD19, CD3, PD-1, GD2, CD38, SLAMF7, PDGFRα, PD-L1, CD22, CD33, IFNγ, CD79β, or any combination thereof.

[0576] In some embodiments, cells described herein are utilized in combination with checkpoint inhibitors. Examples of suitable combination therapy checkpoint inhibitors include, but are not limited to, antagonists of PD-1 (Pdcdl, CD279), PDL-1 (CD274), TIM-3 (Havcr2), TIGIT (WUCAM and Vstm3), LAG-3 (Lag3, CD223), CTLA-4 (Ctla4, CD152), 2B4 (CD244), 4-1BB (CD137), 4-1BBL (CD137L), A2aR, BATE, BTLA, CD39 (Entpdl), CD47, CD73 (NT5E), CD94, CD96, CD160, CD200, CD200R, CD274, CEACAMI, CSF-1R, Foxpl, GARP, HVEM, IDO, EDO, TDO, LAIR-1, MICA/B, NR4A2, MAFB, OCT-2 (Pou2f2), retinoic acid receptor alpha (Rara), TLR3, VISTA, NKG2A/HLA-E, inhibitory KIR (for example, 2DL1, 2DL2, 2DL3, 3DL1, and3DL2), or any suitable combination thereof.

[0577] In some embodiments, the antagonist inhibiting any of the above checkpoint molecules is an antibody. In some embodiments, the checkpoint inhibitory antibodies may be murine antibodies, human antibodies, humanized antibodies, a camel Ig, a shark heavy chain-only antibody (VNAR), Ig NAR, chimeric antibodies, recombinant antibodies, or antibody fragments thereof. Non-limiting examples of antibody fragments include Fab, Fab′, F(ab)′2, F(ab)′3, Fv, single chain antigen binding fragments (scFv), (scFv)2, disulfide stabilized Fv (dsFv), minibody, diabody, triabody, tetrabody, single-domain antigen binding fragments (sdAb, Nanobody), recombinant heavy-chain-only antibody (VHH), and other antibody fragments that maintain the binding specificity of the whole antibody, which may be more cost-effective to produce, more easily used, or more sensitive than the whole antibody. In some embodiments, the one, or two, or three, or more checkpoint inhibitors comprise at least one of atezolizumab (anti-PDL1 mAb), avelumab (anti-PDL1 mAb), durvalumab (anti-PDL1 mAb), tremelimumab (anti-CTLA4 mAb), ipilimumab (anti-CTLA4 mAb), IPH4102 (anti-KIR), IPH43 (anti-MICA), IPH33 (anti-TLR3), lirimumab (anti-KIR), monalizumab (anti-NKG2A), nivolumab (anti-PD1 mAb), pembrolizumab (anti-PD 1 mAb), and any derivatives, functional equivalents, or biosimilars thereof.

[0578] In some embodiments, the antagonist inhibiting any of the above checkpoint molecules is microRNA-based, as many miRNAs are found as regulators that control the expression of immune checkpoints (Dragomir et al., Cancer Biol Med. 2018, 15(2): 103-115). In some embodiments, the checkpoint antagonistic miRNAs include, but are not limited to, miR-28, miR-15/16, miR-138, miR-342, miR-20b, miR-21, miR-130b, miR-34a, miR-197, miR-200c, miR-200, miR-17-5p, miR-570, miR-424, miR-155, miR-574-3p, miR-513, miR-29c, and/or any suitable combination thereof.

[0579] In some embodiments, cells described herein (e.g., cells modified using methods of the disclosure) are used in combination with one or more cancer treatment modalities such as exogenous interleukin (IL) dosing. In some embodiments, an exogenous IL provided to a patient is IL-15. In some embodiments, systemic IL-15 dosing when used in combination with cells described herein is reduced when compared to standard dosing concentrations (see e.g., Waldmann et al., IL-15 in the Combination Immunotherapy of Cancer. Front. Immunology, 2020).

[0580] Other compounds that are effective in treating cancer are known in the art and described herein that are suitable for use with the compositions and methods of the present disclosure as additional cancer treatment modalities are described, for example, in the “Physicians' Desk Reference, 62nd edition. Oradell, N.J.: Medical Economics Co., 2008”, Goodman & Gilman's “The Pharmacological Basis of Therapeutics, Eleventh Edition. McGraw-Hill, 2005”, “Remington: The Science and Practice of Pharmacy, 20th Edition. Baltimore, Md.: Lippincott Williams & Wilkins, 2000,” and “The Merck Index, Fourteenth Edition. Whitehouse Station, N.J.: Merck Research Laboratories, 2006”, incorporated herein by reference in relevant parts.

[0581] All publications, patents and patent applications cited herein, whether supra or infra, are hereby incorporated by reference in their entirety.

[0582] Throughout this specification, unless the context requires otherwise, the words “comprise”, “comprises” and “comprising” will be understood to imply the inclusion of a stated step or element or group of steps or elements but not the exclusion of any other step or element or group of steps or elements. By “consisting of is meant including, and limited to, whatever follows the phrase “consisting of:” Thus, the phrase “consisting of” indicates that the listed elements are required or mandatory, and that no other elements may be present. By “consisting essentially of” is meant including any elements listed after the phrase, and limited to other elements that do not interfere with or contribute to the activity or action specified in the disclosure for the listed elements. Thus, the phrase “consisting essentially” of indicates that the listed elements are required or mandatory, but that no other elements are optional and may or may not be present depending upon whether or not they affect the activity or action of the listed elements.

[0583] These and other changes can be made to the embodiments in light of the above-detailed description. In general, in the following claims, the terms used should not be construed to limit the claims to the specific embodiments disclosed in the specification and the claims, but should be construed to include all possible embodiments along with the full scope of equivalents to which such claims are entitled. Accordingly, the claims are not limited by the disclosure.

[0584] The various embodiments described above can be combined to provide further embodiments. All of the U.S. patents, U.S. patent application publications, U.S. patent applications, foreign patents, foreign patent applications and non-patent publications referred to in this specification and/or listed in the Application Data Sheet are incorporated herein by reference, in their entirety. The contents of database entries, e.g., NCBI nucleotide or protein database entries provided herein, are incorporated herein in their entirety. Where database entries are subject to change over time, the contents as of the filing date of the present application are incorporated herein by reference. Aspects of the embodiments can be modified, if necessary to employ concepts of the various patents, applications and publications to provide yet further embodiments.

[0585] The disclosure is further illustrated by the following examples. The examples are provided for illustrative purposes only. They are not to be construed as limiting the scope or content of the disclosure in any way.

### EXAMPLES

### Example 1: Screening of Guide RNAs for GAPDH

[0586] This example describes the screening of AsCpf1 (AsCas12a) guide RNAs that target the housekeeping gene GAPDH. GAPDH encodes Glyceraldehyde-3-Phosphate Dehydrogenase, an essential protein that catalyzes oxidative phosphorylation of glyceraldehyde-3-phosphate in the presence of inorganic phosphate and nicotinamide adenine dinucleotide (NAD), an important energy-yielding step in carbohydrate metabolism. The guide RNAs used in this analysis were all 41-mer RNA molecules with the following design: 5′-UAAUUUCUACUCUUGUAGAU-[21-mer targeting domain sequence]-3′ (SEQ ID NO: 90). For example, the guide RNA denoted RSQ22337 had the following sequence:

(SEQ ID NO: 93)
5′-UAAUUUCUACUCUUGUAGAUAUCUUCUAGGUAUGACAACGA-3′

where the 21-mer targeting domain sequence is underlined. The guide RNAs with the targeting domain sequences shown in Table 13 were tested to determine how effective they were at editing GAPDH. Cas12a RNPs (RNPs having an engineered Cas12a (SEQ ID NO: 62)), containing each of these guide RNAs were transfected into iPSCs, and then editing levels were assayed three days after transfection (see e.g., Wong, K. G. et al. CryoPause: A New Method to Immediately Initiate Experiments after Cryopreservation of Pluripotent Stem Cells. Stem Cell Reports 9, 355-365 (2017)). The results are shown in FIG. 1 and FIG. 2. RSQ24570, RSQ24582, RSQ24589, RSQ24585, and RSQ22337 exhibited the greatest levels of measurable editing out of the GAPDH guides tested, editing approximately 70% or more of cells (about 92%, 89%, 88%, 87%, and 70%, respectively). It was observed that cells transfected with gRNAs targeting certain exonic regions yielded much lower amounts of isolatable genomic DNA (gDNA) for analyzing editing efficiency (at day 3 after transfection) when compared to cells transfected with gRNAs targeting intronic regions, indicating that that RNPs with certain exon-targeting gRNAs were cytotoxic to the cells. This suggested that cells edited with gRNAs targeting exonic regions could result in significant cell death due to the introduction of indels within GAPDH leading to expression of a non-functional GAPDH protein or a protein with insufficient function. It was postulated that it might be possible to use a rescue plasmid to repair the gRNA-mediated cleavage site in GAPDH while also knocking in a gene cargo of interest in frame with the repaired GAPDH via HDR, thereby rescuing those cells in which GAPDH is repaired and the cargo of interest is successfully integrated (as shown in FIG. 1 and FIG. 2). Those transfected cells that are edited (the majority of transfected cells, if a highly effective RNA-guided nucleases is used) but do not undergo HDR repair of GAPDH and do not integrate the cargo of interest die over time because they do not have a functioning GAPDH gene. Those cells carrying the cargo of interest would have an advantage due to a fully functioning GAPDH gene as the cells grow and divide, and these cells would be selected for over time. The expected end result would be a population of cells with a very high rate of cargo knock-in within the GAPDH locus.

[0587] The data in FIG. 2 suggested that while Cas12a RNP comprising RSQ22337 resulted in an editing level of approximately 70% at 3 days post-transfection, it caused slightly higher levels of toxicity than other exonic guides (RSQ24570, RSQ24582, RSQ24589, and RSQ24585) (see FIG. 2, only about 3.9 ng/μL of gDNA was isolated from edited cells). Thus, the actual editing efficiency was very likely significantly higher than 70%, as many cells had already died by 3 days post-transfection due to the lack of available rescue constructs and NHEJ forming toxic indels. As a result, RSQ22337 was chosen for further testing.

TABLE 13
Guide RNA sequences

| SEQ ID | | gRNA targeting domain | |
|---|---|---|---|
| NO: | Name | sequence (RNA) | Location |
| 94 | RSQ22336 | UGAGCCAGCCACCAGAGGGCG | Intron 8 |
| 95 | RSQ22337 | AUCUUCUAGGUAUGACAACGA | Intron 8/Exon 9 (cut site |
| | | | in exon 9) |
| 96 | RSQ22338 | GCUACAGCAACAGGGUGGUGG | Exon 9 |
| 97 | RSQ24559 | CCAUAAUUUCCUUUCAAGGUG | Intron 7 |
| 98 | RSQ24560 | CUUUCAAGGUGGGGAGGGAGG | Intron 7 |
| 99 | RSQ24561 | AAGGUGGGGAGGGAGGUAGAG | Intron 7 |
| 100 | RSQ24562 | GCAGACCACAGUCCAUGCCAU | Exon 8 |
| 101 | RSQ24563 | CAGACCACAGUCCAUGCCAUC | Exon 8 |
| 102 | RSQ24564 | CCGGAGGGGCCAUCCACAGUC | Exon 8 |
| 103 | RSQ24565 | UAGACGGCAGGUCAGGUCCAC | Exon 8 |
| 104 | RSQ24566 | CUAGACGGCAGGUCAGGUCCA | Exon 8 |
| 105 | RSQ24567 | UCUAGACGGCAGGUCAGGUCC | Exon 8 |
| 106 | RSQ24568 | GCAGGUUUUUCUAGACGGCAG | Exon 8 |
| 107 | RSQ24569 | UCAAGCUCAUUUCCUGGUAUG | Exon 8 |
| 108 | RSQ24570 | CUGGUAUGUGGCUGGGGCCAG | Exon 8/Intron 8 (cut site |
| | | | in intron 8) |
| 109 | RSQ24571 | AGAGCCAGUCUCUGGCCCCAG | Intron 8 |
| 110 | RSQ24572 | AAGAGCCAGUCUCUGGCCCCA | Intron 8 |
| 111 | RSQ24573 | UAAGAGCCAGUCUCUGGCCCC | Intron 8 |
| 112 | RSQ24574 | CUGAGCCAGCCACCAGAGGGC | Intron 8 |
| 113 | RSQ24575 | UCUGAGCCAGCCACCAGAGGG | Intron 8 |
| 114 | RSQ24576 | CAUCUUCUAGGUAUGACAACG | Exon 9 |
| 115 | RSQ24578 | UUGAUGGUACAUGACAAGGUG | 1 kb_downstream |
| 116 | RSQ24579 | GAGGCCCUACCCUCAGUCUGA | 1 kb_downstream |
| 117 | RSQ24580 | CCUCUCCUCGCUCCAGUCCUA | 1 kb_downstream |
| 118 | RSQ24581 | CUCUCCUCGCUCCAGUCCUAG | 1 kb_downstream |
| 119 | RSQ24582 | GCCAACAGCAGAUAGCCUAGG | 1 kb_downstream |
| 120 | RSQ24583 | UGUGCCCUCGUGUCUUAUCUG | 1 kb_downstream |
| 121 | RSQ24584 | CCUAGAUGAAUCCUGCUUGAA | 1 kb_downstream |
| 122 | RSQ24585 | GGUACUUGGUUUACCUAGAUG | 1 kb_downstream |
| 123 | RSQ24586 | AGGUACUUGGUUUACCUAGAU | 1 kb_downstream |
| 124 | RSQ24587 | AAACAUUAUAUAGUCCUUACC | 1 kb_downstream |
| 125 | RSQ24588 | UAAACAUUAUAUAGUCCUUAC | 1 kb_downstream |
| 126 | RSQ24589 | CCGAUUUUUAAACAUUAUAUA | 1 kb_downstream |
| 127 | RSQ24590 | ACCGAUUUUUAAACAUUAUAU | 1 kb_downstream |
| 128 | RSQ24591 | UACCGAUUUUUAAACAUUAUA | 1 kb_downstream |
| 129 | RSQ24592 | AAAAUCGGUAAAAAUGCCCAC | 1 kb_downstream |
| 130 | RSQ24593 | GAGGAAGAUGAACUGAGAUGU | 1 kb_downstream |
| 131 | RSQ24594 | AGGAAGAUGAACUGAGAUGUG | 1 kb_downstream |

### Example 2: Rescue of GAPDH Knock-Out Through Targeted Integration

[0588] To test the feasibility of the exemplary selection system illustrated in FIGS. 3A, 3B, and 3C, the essential gene GAPDH was targeted in iPSCs using an RNP comprising AsCpf1 (SEQ ID NO: 62), and a guide RNA (RSQ22337 (SEQ ID NO: 95)), resulting in a double-strand break towards the 5′ end of the last exon of GAPDH (exon 9). While iPSCs were tested for the purposes of this experiment, the described methods could be applied to other cell types. RSQ22337 was determined to be highly specific to GAPDH and have minimal off-target sites in the genome (data not shown). GAPDH was thus considered a good exemplary candidate target gene for the cargo integration and selection methods described herein, at least in part because there was at least one highly specific gRNA targeting a terminal exon capable of mediating highly efficient RNA-guided cleavage.

[0589] The CRISPR/Cas nuclease and guide RNA were introduced into cells by nucleofection (electroporation) of a ribonucleoprotein (RNP) according to known methods. The cells were also contacted with a double stranded DNA donor template (e.g., a dsDNA plasmid) that included a knock-in cassette comprising in 5′-to-3′ order, a 5′ homology arm approximately 500 bp in length (comprising a portion of exon 8, intron 8, and a 5′ codon-optimized coding portion of exon 9 optimized to prevent further binding of the gRNA targeting domain sequence of the guide RNA (RSQ22337)), an in-frame sequence encoding the P2A self-cleaving peptide (“P2A”), an in-frame coding sequence for CD47 (“Cargo”), a stop codon and polyA signal sequence, and a 3′ homology arm approximately 500 bp in length (comprising a coding portion of exon 9 including a stop codon, the 3′ exonic region of exon 9, and a portion of the downstream intergenic sequence) (as shown in FIG. 3B). The 5′ and 3′ homology arms flanking the knock-in cassette were designed to correspond to sequences surrounding the RNP cleavage site.

[0590] As shown schematically in FIG. 3C, NHEJ-mediated creation of indels in cells that are edited by the DNA nuclease but not successfully targeted by the DNA donor template, produce a non-functional version of GAPDH which is lethal to the cells. This knock-out is “rescued” in cells that are successfully targeted by the DNA donor template by correct integration of the knock-in cassette, which restores the GAPDH coding region so that a functioning gene product is produced, and positions the P2A-Cargo sequence in frame with and downstream (3′) of the GAPDH coding sequence. These cells survive and continue to proliferate. Cells that are not edited by the DNA nuclease also continue to proliferate but are expected to represent a very small percentage of the overall cell population, if, as in this case, the editing efficiency of the nuclease in combination with the gRNA is high (see Example 1) and results in creation of a non-functional protein. The editing results for RSQ22337 likely underestimate the actual editing efficiency of the guide due to cell death within the population of edited cells.

[0591] The editing efficiency of RNPs containing RSQ22337 were tested at different concentrations (4 μM, 1 μM, 0.25 μM, or 0.0625 μM of RNP) in the absence of double stranded DNA donor template) was first measured at 48 after nucleofection of iPSCs (a time point prior to cell death due to loss of GAPDH gene function). The results show that a concentration of 4 μM resulted in the highest editing levels (see FIG. 4).

[0592] FIGS. 5 and 6 show that a protein-encoding cargo gene can be knocked into a housekeeping gene, such as GAPDH, at high efficiency using the selection systems described herein. FIG. 5 shows the knock-in (KI) efficiency of the CD47-encoding “cargo” in GAPDH at 4 days post-electroporation when RNP was present at a concentration of 4 μM and the dsDNA plasmid (“PLA”) encoding CD47 was also present. Knock-in efficiency was measured with two different concentrations of the plasmid (0.5 μg and 2.5 μg of plasmid) and found to be dose responsive. Knock-in was measured using ddPCR targeting the 3′ position of the knock-in “cargo”. Control cells electroporated with RNP alone or PLA alone exhibited much lower knock-in rates than electroporation of RNP and PLA (at a concentration of 2.5 μg).

[0593] FIG. 6 shows the knock-in efficiency of the CD47-encoding “cargo” in GAPDH at 9 days post-electroporation of the cells with the RNP and dsDNA plasmid encoding CD47. The percentage knock-in was similar when either the 5′ end or the 3′ end of the cargo was assayed by ddPCR, using a primer specific for the 5′ of the gRNA target site or 3′ of the site in the poly A region, increasing the reliability of the result. The knock-in efficiency of the cargo was significantly higher at 9 days compared to at 4 days post-transfection (compare FIGS. 5 and 6), consistent with the expectation that there would be substantial cell death in RNP-induced GAPDH knock-out cells that lacked a functional GAPDH gene as a result of unsuccessful cargo knock-in and rescue at GAPDH.

[0594] An experiment was then conducted to test the mechanism of the selection system described above by confirming that edited cells containing a successfully knocked-in cargo gene would be more efficiently selected for using a gRNA targeting a protein-coding exonic portion of GAPDH rather than a gRNA targeting an intron. FIG. 7 compares the knock-in efficiency of a GFP-encoding “cargo” knock-in cassette at the GAPDH locus when using a gRNA that mediates cleavage within an intron (RSQ24570 (SEQ ID NO: 108) binds to the exon 8-intron 9 junction, leading to Cas12a-mediated cleavage within intron 8) relative to a gRNA specific for an exon (RSQ22337 (SEQ ID NO: 95), targeting the intron 8-exon 9 junction, leading to Cas12a-mediated cleavage within exon 9). Rescue dsDNA plasmid PLA1593 comprising the reporter “cargo” GFP was nucleofected into iPSCs with an RNP (Cas12a and RSQ22337) targeting GAPDH as described above, while dsDNA plasmid PLA1651 comprising a donor template sequence as depicted in SEQ ID NO: 46 was nucleofected with an RNP comprising Cas12a and RSQ24570. The homology arms of each plasmid were designed to mediate HDR based on the target site of each gRNA. Knock-in was visualized using microscopy (FIG. 7A) and was measured using flow cytometry (FIG. 7B). Knock-in efficiency was significantly higher when using a gRNA and associated knock-in cassette that cleaves at an exonic coding region (exon 9) when compared to an intronic region (intron 8). FIG. 7B shows that 95.6% of cells electroporated with RSQ22337 and the GFP-encoding “cargo” knock-in cassette (e.g., PLA1593; comprising donor template SEQ ID NO: 44) expressed GFP compared to only 2.1% of cells electroporated with RSQ24570 and a GFP-encoding “cargo” knock-in cassette (PLA1651; comprising donor template SEQ ID NO: 46). The results depicted in FIG. 7 are striking, as while the measured editing efficiency (as determined by indel generation frequency 72 hours post-transfection as discussed above in Example 1, see FIG. 2) of RSQ24570 is higher than that of RSQ22337, the proportion of cells rescued by the knock-in construct targeting the coding exonic region are significantly higher.

[0595] In an additional set of experiments, iPS cells were contacted with an RNP containing AsCas12a (SEQ ID NO: 62), and RSQ22337 (SEQ ID NO: 95) or RSQ24570 (SEQ ID NO: 108), along with either the PLA1593 (comprising donor template SEQ ID NO: 44) or the PLA1651 (comprising donor template SEQ ID NO: 46) double stranded DNA donor template plasmid, respectively, as described above. Flow cytometry was performed 7 days following nucleofection to detect GFP expression and help determine to what extent each plasmid mediated donor template and knock-in cassette was integrated successfully at its respective GAPDH target site. The GAPDH results in FIG. 11A show that cells nucleofected with the RNP containing RSQ22337 exhibited a much higher amount of GFP expression relative to cells nucleofected with RSQ24750, showing that most cells express GFP at day 7 following electroporation. This suggests that the GFP-encoding knock-in cassette integrated successfully at high levels within the RSQ22337-transfected cells. Cells nucleofected with RNPs containing RSQ24750 displayed much lower GFP expression, indicating that the knock-in cassette did not integrate successfully in most of these cells (FIG. 11A). The GAPDH results of FIG. 11B show that use of RSQ22337 resulted in about 80% editing as measured using genomic DNA 48 hours following RNP transfection, while RSQ24570 resulted in about 75% editing as measured using genomic DNA 48 hours following RNP transfection. The high editing of RSQ22337 correlated well with the high GFP expression level depicted in FIG. 11A; however, the high editing of RSQ24750 correlated poorly with the low GFP expression level depicted in FIG. 11A. FIG. 11C and FIG. 11D (representing an additional experiment where RSQ22337 was again used for editing at the GAPDH locus) show the relative integrated “cargo” (GFP) expression intensity of the edited cells. Finally, a ddPCR assay was conducted to determine the percentage of knock-in integration events in GAPDH alleles in the cells nucleofected with RNPs containing RSQ22337 and the PLA1593 donor plasmid. FIG. 13 shows by ddPCR that over 60% of alleles had a GFP-encoding cassette knocked-in successfully.

### Example 3: Rescue of GAPDH Knock-Out Through Targeted Integration of Multiple Cargos

[0596] In some cases, it is desirable to use the selection and cargo knock in strategies disclosed herein to efficiently produce and isolate an edited cell containing two or more different exogenous coding sequences, e.g., two or more different exogenous genes, integrated into a single essential gene locus, such as, e.g., the GAPDH locus. FIG. 8 shows two strategies for introducing two or more different exogenous coding regions into an essential gene locus. FIG. 8A shows a first exemplary strategy wherein a multi-cistronic knock-in cassette, e.g., a bi-cistronic knock-in cassette containing two or more coding regions (GFP and mCherry in FIG. 8A), separated by linkers (e.g., T2A, P2A, and/or IRES; see SEQ ID NO: 29-32 and 33-37), is inserted into one or both of the alleles of the essential gene, e.g., GAPDH. FIG. 8B shows a second exemplary strategy (a bi-allelic insertion strategy) wherein two knock-in cassettes comprising different cargo sequences (e.g., different exogenous genes, such as GFP and mCherry in FIG. 8B) are inserted into separate alleles of the essential gene locus, e.g., GAPDH.

[0597] Experiments were conducted to test the integration strategy depicted in FIG. 8A, and to determine whether the use of different combinations of linkers in the knock-in cassette could affect the expression of the cargo sequences. An RNP containing Cas12a and RSQ22337 (targeting the GAPDH locus, as described in Examples 1 and 2) was nucleofected into iPSCs with one of six different plasmids (PLA) containing a bi-cistronic knock-in cassette comprising “cargo” sequences encoding GFP and mCherry (PLA1573, PLA1574, PLA1575, PLA1582, PLA1583, and PLA1584, as depicted in FIG. 9A; comprising donor templates SEQ ID NOs: 38-43). GFP was the first cargo and mCherry was the second cargo in each of these constructs. Each of the tested plasmids contained a different combination of linkers between the coding sequences (Linkers 1 and 2, as depicted in FIG. 9A). PLA1573 (comprising donor template SEQ ID NO: 38) contained T2A and T2A as linkers 1 and 2, respectively; PLA1574 (comprising donor template SEQ ID NO: 39) contained P2A and IRES as linkers 1 and 2, respectively; PLA1575 (comprising donor template SEQ ID NO: 40) contained P2A and P2A as linkers 1 and 2, respectively; PLA1582 (comprising donor template SEQ ID NO: 41) contained P2A and T2A as linkers 1 and 2, respectively; PLA1583 (comprising donor template SEQ ID NO: 42) contained T2A and P2A as linkers 1 and 2, respectively; and PLA1584 (comprising donor template SEQ ID NO: 43) contained T2A and IRES as linkers 1 and 2, respectively. FIG. 9B and FIG. 9C shows the results of various knock-in cassette integration events at the GAPDH locus. FIG. 9B depicts exemplary microscopy images (brightfield and fluorescent microscopy at 2× on a Keyence microscope) of edited iPSCs nine days following nucleofection with exemplary plasmids PLA1582, PLA1583, and PLA1584, each of which exhibited detectable GFP and mCherry expression.

[0598] FIG. 9C quantifies the fluorescence levels of GFP and mCherry in the iPSCs nucleofected with the various plasmids described in FIG. 9A containing the bi-cistronic knock-in cassettes with the different described linker pairs (PLA1575, PLA1582, PLA1574, PLA1583, PLA1573, and PLA1584). In each of these bi-cistronic constructs, GFP was always the first cargo and mCherry was always the second cargo. A plasmid containing a knock-in cassette with mCherry as a sole “cargo” (as depicted in FIG. 9C) was also tested as a control. The data show that the expression levels of GFP, as the first cargo, were similar between bicistronic constructs and consistently higher than the expression levels of mCherry, the second cargo. Cells containing the control knock-in cassette containing mCherry as the sole cargo exhibited the highest mCherry expression, suggesting that it is possible to vary (e.g., reduce) expression of a cargo by placing it as the second cargo in a bicistronic cassette. In addition, FIG. 9C shows that placement of an IRES linker immediately prior to the second cargo coding sequence resulted in lower expression of the second cargo when compared to the placement of a P2A or T2A linker prior to the second cargo coding sequence. Thus, the results show that it is possible to differentially modulate (i.e., increase or decrease) the expression of two cargo coding sequences from a multicistronic knock-in cassette by varying the order of the cargos in the cassette (placing a cargo as the first cargo for higher expression, or as the second cargo for lower expression) and by placing particular linkers (P2A or T2A for higher expression; IRES for lower expression) upstream of each of the cargos.

[0599] An experiment was conducted to test the bi-allelic integration strategy depicted in FIG. 8B. An RNP containing Cas12a and RSQ22337 (targeting the GAPDH locus, as described in Examples 1 and 2) was nucleofected into iPSCs with two different plasmids. One plasmid contained a knock-in cassette containing a GFP coding sequence as the cargo, and the second plasmid contained a knock-in cassette containing an mCherry coding sequence as the cargo (as depicted in FIG. 8B). FIG. 10A shows exemplary flow cytometry data for the nucleofected iPSCs. Gating showed that a high percentage, approximately 15%, of the nucleofected cells expressed GFP and mCherry, suggesting that the GFP knock-in cassette and the mCherry knock-in cassette were each integrated into an allele of GAPDH. Approximately 41% of the nucleofected cells expressed mCherry and approximately 36% of the nucleofected cells expressed GFP.

[0600] An additional experiment was conducted to test biallelic insertion of GFP and mCherry in populations of iPSCs. The iPSC populations were transformed as described. The cells were nucleofected with 0.5 μM RNPs comprising Cas12a and RSQ22337 (targeting the GAPDH locus, as described in Examples 1 and 2), and 2.5 μg of donor template (5 trials) or 5 μg of donor template (1 trial), and then sorted 3 or 9 days following nucleofection. An exemplary image of the edited cell populations that were analyzed by flow cytometry analysis is depicted in FIG. 10B. FIG. 10C provides the flow cytometry analysis results from these trials. The larger bar at each time point (day 3 or day 9) in FIG. 10C represents the total percentage of the cells in each population that positively express at least one cargo, e.g., at least one allele of GFP and/or at least one allele of mCherry cargo. The smaller bar at each time point shows the percentage of cells in each population that express both GFP and mCherry and therefore represents cells with GFP/mCherry biallelic integration. These results showed that approximately 8-15% percent of the transformed cells in each population displayed a biallelic GFP/mCherry insertion phenotype at nine days following transformation.

### Example 4: Rescue of B2M Knock-Out Through Targeted Integration

[0601] The approach described in Example 2 is used to target the B2M gene in NK cells (e.g., by targeting NK cells such as iPS-derived NK cells directly or iPS cells that are then differentiated into NK cells). NK cells that lack a functional B2M gene will not be able to recognize MHC Class I on the surface of one another and will attack each other, depleting the population in a phenomenon known as fratricide. By knocking-out the B2M gene and knocking-in a “cargo” sequence that also restores a functional B2M gene one automatically enriches for the knock-in cell type.

### Example 5: Rescue of TBP Knock-Out Through Targeted Integration

[0602] The knock-in integration and selection approach described in Example 2 was used to target the TBP gene in iPSCs. While iPSCs were tested for the purposes of this experiment, the described methods could be applied to other cell types. The TBP gene encodes TATA-box binding protein, a transcriptional regulator that plays a key role in the transcription initiation apparatus. AsCpf1 (AsCas12a) guide RNAs that target terminal exons of the TBP gene are shown in Table 14 below. The guide RNAs are all 41-mer RNA molecules with the following design: 5′-UAAUUUCUACUCUUGUAGAU-[21-mer targeting domain sequence]-3′ (SEQ ID NO: 90).

TABLE 14
Guide RNA sequences

| | | gRNA targeting domain | | |
|---|---|---|---|---|
| Name | Target Site | sequence (RNA) | Location | Plasmid |
| TBP-1 | RSQ33502 | AAAUGCUUCAUAAAUUUCUGC | Isoform 1 exon 8; | PLA1615 |
| | (SEQ ID | | isoform 2 exon 7 | |
| | NO: 148 | | | |
| TBP-2 | RSQ33503 | UGCUCUGACUUUAGCACCUAA | Isoform 1 exon 8; | PLA1616 |
| | (SEQ ID | | isoform 2 exon 7 | |
| | NO: 149) | | | |
| TBP-3 | RSQ33504 | AAAACAUCUACCCUAUUCUAA | Isoform 1 exon 8; | PLA1617 |
| | (SEQ ID | | isoform 2 exon 7 | |
| | NO: 150) | | | |

[0603] RSQ33502, RSQ33503, and RSQ33504 (SEQ ID NO: 148-150) described in Table 14 were each determined to be highly specific to TBP and have minimal off-target sites in the genome (data not shown). The TBP gene was thus considered a good candidate gene target for the cargo integration and selection methods described herein at least in part because there are gRNAs available capable of very specifically targeting a terminal exon (mRNA isoform 1 exon 8, or mRNA isoform 2 exon 7 respectively). However, for any of these gRNAs to be highly suitable for the methods described herein, they need to be highly effective at introducing indels at a location in the TBP locus that would knock out and/or severely reduce gene function.

[0604] Each of these gRNAs was then tested to determine whether it could be used to knock-in a cassette comprising a portion of TBP and an in-frame cargo sequence encoding GFP into a terminal exon of the TBP gene of cells, in the process rescuing the lethal phenotype that would otherwise result by introducing RNP-induced indels into the coding region of this essential gene. If the tested gRNA was effective at introducing indels at a location of TBP important for function at a high frequency, then transfected cells that do not undergo HDR to incorporate the knock-in cassette would be expected to die, resulting in a large population of the cells expressing GFP from the TBP locus. Specifically, iPSC cells were contacted with an RNP containing AsCas12a (SEQ ID NO: 62), and RSQ33502, RSQ33503 or RSQ33504 (SEQ ID NOs: 148-150), along with a double stranded DNA donor template (dsDNA plasmid) designed to mediate HDR at each respective gRNA target binding site. The double stranded DNA donor templates included a knock-in cassette with a coding sequence for GFP (“Cargo”) in frame with and downstream (3′) of a codon optimized version of a portion of the final TBP exon coding sequence (mRNA isoform 1 exon 8, or mRNA isoform 2 exon 7 respectively) and a sequence encoding the P2A self-cleaving peptide (“P2A”), similar to the dsDNA plasmid described in Example 2 for GAPDH. The TBP sequence in the double stranded DNA donor templates (PLA1615, PLA1616, or PLA1617; comprising donor template SEQ ID NOs: 47, 49, or 50) was codon optimized to prevent further binding by the accompanying guide RNA molecule (RSQ33502, RSQ33503 or RSQ33504). The knock-in cassette also included 3′ UTR and polyA signal sequences downstream of the Cargo sequence. An RNP containing RSQ33502 was administered with PLA1615 (comprising donor template SEQ ID NO: 47); RSQ33503 was administered with PLA1616 (comprising donor template SEQ ID NO: 49); and RSQ33504 was administered with PLA1617 (comprising donor template SEQ ID NO: 50). Each particular dsDNA plasmid (PLA) contained a donor template with homology arms and a knock-in cassette designed to specifically encompass and render ineffective the particular gRNA target site following knock-in cassette integration.

[0605] Flow cytometry was performed 7 days following nucleofection and was used to help determine to what extent each plasmid based knock-in cassette was integrated successfully at its respective TBP target site. FIG. 11A shows that cells nucleofected with RNPs containing RSQ33503 exhibited the greatest amounts of GFP expression relative to cells nucleofected with the other RNPs, suggesting that the GFP-encoding knock-in cassette integrated successfully at high levels within these cells. FIG. 12 shows that approximately 76% of the cells nucleofected with RNPs containing RSQ33503 (SEQ ID NO: 149) and the PLA1616 (comprising donor template SEQ ID NO: 49) plasmid expressed GFP compared to only about 1% of cells nucleofected with the PLA1616 plasmid alone (no RNP control). Cells nucleofected with RNPs containing RSQ33504 (SEQ ID NO: 150) also exhibited high levels of GFP expression, also suggesting higher knock-in cassette integration levels (FIG. 11A). Cells nucleofected with RNPs containing RSQ33502 (SEQ ID NO: 148) displayed much lower GFP expression, indicating that the knock-in cassette did not integrate successfully in most of these cells (FIG. 11A). FIG. 11B shows that use of the RNP containing RSQ33503 (SEQ ID NO: 149) resulted in about 80% editing, which correlated with the higher GFP expression level depicted in FIG. 11A. The percentage editing was measured two days following transfection and was determined by ICE assays (as described in Hsiau et al., Inference of CRISPR Edits from Sanger Trace Data. BioRxiv, 251082, August 2019). Use of the RNP containing RSQ33502 (SEQ ID NO: 148) resulted in a relatively low editing percentage, which correlated with the low GFP expression in FIG. 11A. FIG. 11C and FIG. 11D (representing an additional experiment where RSQ33503 was again used for editing at the TBP locus) show the relative integrated “cargo” (GFP) expression intensity of the edited cells. Finally, a ddPCR assay was conducted to determine the percent knock-in of the GFP cargo into the TBP alleles of the cells nucleofected with RNPs containing RSQ33503 (SEQ ID NO: 149) and the PLA1616 donor plasmid (comprising donor template SEQ ID NO: 49). FIG. 13 shows by ddPCR that over 40% of the TBP alleles had the GFP-encoding cassette successfully knocked-in.

### Example 6: Rescue of E2F4 Knock-Out Through Targeted Integration

[0606] The knock-in integration and selection approach described in Example 2 was used to target the E2F4 gene in iPSCs. While iPSCs were tested for the purposes of this experiment, the described methods could be applied to other cell types. The E2F4 gene encodes E2F Transcription Factor 4. This transcriptional regulator plays a key role in cell cycle regulation. AsCpf1 (AsCas12a) guide RNAs that target terminal exons of the E2F4 gene are shown in Table 15 below. The guide RNAs are all 41-mer RNA molecules with the following design: 5′-UAAUUUCUACUCUUGUAGAU-[21-mer targeting domain sequence]-3′ (SEQ ID NO: 90).

TABLE 15
Guide RNA sequences

| | | gRNA targeting domain | | |
|---|---|---|---|---|
| Name | Target Site | sequence (RNA) | Location | Plasmid |
| E2F4-1 | RSQ33505 | CCCCUCUGCUUCGUCUUUCUC | Exon 10 | PLA1626 |
| | (SEQ ID NO: 151) | | | |
| E2F4-2 | RSQ33506 | UCCACCCCCGGGAGACCACGA | Exon 10 | PLA1627 |
| | (SEQ ID NO: 152) | | | |
| E2F4-3 | RSQ33507 | AUGUGCCUGUUCUCAACCUCU | Exon 10 | PLA1628 |
| | (SEQ ID NO: 153) | | | |

[0607] RSQ33505, RSQ33506, and RSQ33507 (SEQ ID NOs: 151-153) were each determined to be highly specific to E2F4 and have minimal off-target sites in the genome (data not shown). The E2F4 gene was thus considered a good candidate gene target for the cargo integration and selection methods described herein at least in part because there are gRNAs available that are capable of very specifically targeting a terminal exon (exon 10). However, for any of these gRNAs to be highly suitable for the methods described herein, they need to be highly effective at introducing indels at a location in the E2F4 locus that would knock out or severely reduce gene function.

[0608] The gRNAs RSQ33505, RSQ33506, and RSQ33507 (SEQ ID NOs: 151-153) were then tested to determine whether they could be used to knock-in a cassette comprising a portion of E2F4 and a cargo sequence encoding GFP into a terminal exon of the E2F4 locus of cells, in the process rescuing the lethal phenotype that would otherwise result by introducing RNP-induced indels into the coding region of this essential gene at a high frequency. Specifically, iPSCs were contacted with an RNP containing AsCas12a (SEQ ID NO: 62), and RSQ33505, RSQ33506, or RSQ33507 (SEQ ID NOs: 151-153) along with a double stranded DNA donor template (dsDNA plasmid) designed to mediate HDR at each respective gRNA target binding site. The double stranded DNA donor templates included a knock-in cassette with a coding sequence for GFP (“Cargo”) in frame with and downstream (3′) of a codon optimized version of the final F2F4 exon coding sequence (exon 10) and a sequence encoding the P2A self-cleaving peptide (“P2A”), similar to the dsDNA plasmid described in Example 2 for GAPDH. The E2F4 sequence in the double stranded DNA donor templates (PLA1626, PLA1627, or PLA1628; comprising donor template SEQ ID NOs: 52-54) was codon optimized to prevent further binding by the accompanying guide RNA molecule (RSQ33505, RSQ33506 or RSQ33507; SEQ ID NOs: 151-153). The knock-in cassette also included 3′ UTR and polyA signal sequences downstream of the Cargo sequence. An RNP containing RSQ33505 (SEQ ID NO: 151) was administered with PLA1626 (comprising donor template SEQ ID NO: 52); RSQ33506 (SEQ ID NO: 152) was administered with PLA 1627 (comprising donor template SEQ ID NO: 53); and RSQ33507 (SEQ ID NO: 153) was administered with PLA1628 (comprising donor template SEQ ID NO: 54). Each particular dsDNA plasmid (PLA) contained a donor template with homology arms and a knock-in cassette designed to specifically encompass and render ineffective the particular gRNA target site following integration.

[0609] Flow cytometry was performed 7 days following nucleofection and was used to help determine to what extent each plasmid based knock-in cassette was integrated successfully at its respective E2F4 target site. FIG. 11A shows that cells nucleofected with RNPs containing RSQ33505 (SEQ ID NO: 151) exhibited the greatest amount of GFP expression relative to cells nucleofected with the other RNPs targeting E2F4, suggesting that the GFP-encoding knock-in cassette integrated successfully in many of these cells. Cells nucleofected with RNPs containing RSQ33506 or RSQ33507 (SEQ ID NOs: 152 and 153) displayed much lower GFP expression, indicating that the knock-in cassette did not integrate successfully in most of these cells (FIG. 11A). FIG. 11B shows that use of RNP containing RSQ33505 (SEQ ID NO: 151) or RSQ33506 (SEQ ID NO: 152) resulted in approximately 15% and approximately 20% editing rates respectively, when measured 48 hours after RNP transfection. The relatively lower observed editing rate for RSQ33505 (SEQ ID NO: 151) may be considered to unexpectedly correlate with a relatively high level of GFP integration in E2F4 (as observed in FIG. 11A), and could partially be the result of significant death within the population of edited cells at 48 hours. The percentage editing was measured two days following transfection and was determined by ICE assays (as described in Hsiau et al., August 2019). FIG. 11C shows the relative integrated “cargo” (GFP) expression intensity of the edited cells.

### Example 7: Rescue of G6PD Knock-Out Through Targeted Integration

[0610] The knock-in integration and selection approach described in Example 2 was used to target the G6PD gene in iPSCs. While iPSCs were tested for the purposes of this experiment, the described methods could be applied to other cell types. The G6PD gene encodes Glucose-6-Phosphate Dehydrogenase. This metabolic enzyme plays a key role in glycolysis and NADPH production. An AsCpf1 (AsCas12a) guide RNA that targets terminal exons of the G6PD gene is shown in Table 16 below.

TABLE 16
Guide RNA sequences

| | | gRNA targeting domain | | |
|---|---|---|---|---|
| Name | Target Site | sequence (RNA) | Location | Plasmid |
| G6PD-1 | RSQ33508 | CAGUAUGAGGGCACCUACAAG | Exon 13 | PLA1618 |
| | (SEQ ID NO: 154) | | | |

[0611] RSQ33508 (SEQ ID NO: 154) was determined to be highly specific to G6PD and has minimal off-target sites in the genome (data not shown). The G6PD gene was thus considered a good candidate gene target for the cargo integration and selection methods described herein at least in part because there are gRNAs available that are capable of specifically targeting a terminal exon (exon 13).

[0612] The gRNA RSQ33508 (SEQ ID NO: 154) was then tested to determine whether it could be used to knock-in a cassette comprising a portion of G6PD and a cargo sequence encoding GFP into a terminal exon of the G6PD locus of cells, in the process rescuing the lethal phenotype that would otherwise result by introducing RNP-induced indels into the coding region of this essential gene at a high frequency. Specifically, iPSCs were contacted with an RNP containing AsCas12a (SEQ ID NO: 62), and RSQ33508 (SEQ ID NO: 154) along with a double stranded DNA donor template (dsDNA plasmid) designed to mediate HDR at the gRNA target binding site. The double stranded DNA donor templates included a knock-in cassette with a coding sequence for GFP (“Cargo”) in frame with and downstream (3′) of a codon optimized version of the final G6PD) exon coding sequence (exon 13) and a sequence encoding the P2A self-cleaving peptide (“P2A”), similar to the dsDNA plasmid described in Example 2 for GAPDH. The G6PD) sequence in the double stranded DNA donor templates (PLA1618; comprising donor template SEQ ID NO: 51) was codon optimized to prevent further binding by the accompanying guide RNA molecule (RSQ33508). The knock-in cassette also included 3′ UTR and poly A signal sequences downstream of the Cargo sequence. An RNP containing RSQ33508 (SEQ ID NO: 154) was administered with PLA1618 (comprising donor template SEQ ID NO: 51). The dsDNA plasmid (PLA) contained a donor template with homology arms and a knock-in cassette designed to specifically encompass and render ineffective the accompanying gRNA target site following integration.

[0613] Flow cytometry was performed 7 days following nucleofection and was used to help determine to what extent the plasmid based knock-in cassette was integrated successfully at its G6PD) target site. FIG. 11A shows that cells nucleofected with RNPs containing RSQ33508 (SEQ ID NO: 154) exhibited GFP expression in approximately 10% of assayed cells, suggesting that the GFP-encoding knock-in cassette integrated at relatively low levels within these cells. FIG. 11C shows the relative integrated “cargo” (GFP) expression intensity of the edited cells.

### Example 8: Rescue of KIF11 Knock-Out Through Targeted Integration

[0614] The knock-in integration and selection approach described in Example 2 was used to target the KIF11 gene in iPSCs. While iPSCs were tested for the purposes of this experiment, the described methods could be applied to other cell types. The KIF11 gene encodes Kinesin Family Member 11. This enzyme plays a key role in vesicle movement along intracellular microtubules and chromosome positioning during mitosis. AsCpf1 (AsCas12a) guide RNAs that target terminal exons of the KIF11 gene are shown in Table 17 below.

TABLE 17
Guide RNA sequences

| | | gRNA targeting domain | | |
|---|---|---|---|---|
| Name | Target Site | sequence (RNA) | Location | Plasmid |
| KIF11-1 | RSQ33509 | CCGCCUUAAAUCCACAGCAUA | Intron 21/ | PLA1629 |
| | (SEQ ID NO: 155) | | Exon 22 | |
| KIF11-2 | RSQ33510 | UAACCAAGUGCUCUGUAGUUU | Exon 22 | PLA1630 |
| | (SEQ ID NO: 156) | | | |
| KIF11-3 | RSQ33511 | GACCUCUCCAGUGUGUUAAUG | Exon 22 | PLA1631 |
| | (SEQ ID NO: 157) | | | |

[0615] RSQ33509, RSQ33510, and RSQ33511 (SEQ ID NOs: 155-157) were each determined to be highly specific to KIF11 and have minimal off-target sites in the genome (data not shown). The KIF11 gene was thus considered a good candidate gene target for the cargo integration and selection methods described herein at least in part because there are gRNAs available that are capable of very specifically targeting a terminal exon available (exon 22). However, for any of these gRNAs to be highly suitable for the methods described herein, they need to be highly effective at introducing indels at a location in the KIF11 locus that would knock out or severely reduce gene function.

[0616] Each of these gRNAs was then tested to determine whether it could be used to knock-in a cassette comprising a portion of KIF11 and a cargo sequence encoding GFP into a terminal exon of the KIF11 locus of cells, in the process rescuing the lethal phenotype that would otherwise result by introducing RNP-induced indels into the coding region of this essential gene at a high frequency. Specifically, iPSC cells were contacted with an RNP containing AsCas12a (SEQ ID NO: 62), and RSQ33509, RSQ33510, or RSQ33511 (SEQ ID NOs: 155-157), along with a double stranded DNA donor template (dsDNA plasmid) designed to mediate HDR at each respective gRNA target binding site. The double stranded DNA donor templates included a knock-in cassette with a coding sequence for GFP (“Cargo”) in frame with and downstream (3′) of a codon optimized version of the final KIF11 exon coding sequence (exon 22) and a sequence encoding the P2A self-cleaving peptide (“P2A”), similar to the dsDNA plasmid described in Example 2 for GAPDH. The KIF11 sequence in the double stranded DNA donor templates (PLA1629, PLA1630, or PLA1631; comprising donor template SEQ ID NOs: 55-57) was codon optimized to prevent further binding by the accompanying guide RNA molecule (RSQ33509, RSQ33510, or RSQ33511; SEQ ID NOs: 155-157). The knock-in cassette also included 3′ UTR and polyA signal sequences downstream of the Cargo sequence. An RNP containing RSQ33509 (SEQ ID NO: 155) was administered with the PLA1629 plasmid (comprising donor template SEQ ID NO: 55); RSQ33510 (SEQ ID NO: 156) was administered with PLA1630 (comprising donor template SEQ ID NO: 56); and RSQ33511 (SEQ ID NO: 157) was administered with PLA1631 (comprising donor template SEQ ID NO: 57). Each particular dsDNA plasmid (PLA) contained a donor template with homology arms and a knock-in cassette designed to specifically encompass and render ineffective the particular gRNA target site following integration.

[0617] Flow cytometry was performed 7 days following nucleofection and was used to help determine to what extent each plasmid knock-in cassette was integrated successfully at its respective KIF11 target site. FIG. 11A shows that cells nucleofected with RNPs containing RSQ33509 (SEQ ID NO: 155) exhibited the greatest amount of GFP expression relative to cells nucleofected with the other RNPs targeting KIF11, suggesting that the GFP-encoding knock-in cassette integrated successfully in many of these cells. Cells nucleofected with RNPs containing RSQ33510 or RSQ33511 (SEQ ID NO: 156 or 157) also exhibited some GFP expression (FIG. 11A). FIG. 11B shows that use of the RNPs containing RSQ33509 (SEQ ID NO: 155) resulted in about 40% editing at 48 hours following transfection (the lower level possibly a result of significant cell death in the cell population at this time), correlating with the GFP expression levels depicted in FIG. 11A. Interestingly, FIG. 11B shows that use of RNPs containing RSQ33510 (SEQ ID NO: 156) resulted in about 90% observed editing rates, while RNPs containing RSQ33511 (SEQ ID NO: 157) resulted in about 65% observed editing rates, yet the GFP expression in cells transfected with these guides was relatively low when compared to RSQ33509 (SEQ ID NO: 155) transfected cells. These results suggest that the RSQ33510 or RSQ33511 (SEQ ID NO: 156 or 157) guides may not have been generating sufficiently deleterious indels in KIF11, allowing a high proportion of cells to be viable despite high editing efficiencies, such that transfected cells were not dying in large enough numbers to allow for effective selection of transfected cells with successful cargo knocked in. Thus, although the RSQ33510 and RSQ33511 (SEQ ID NO: 156 or 157) gRNAs are highly specific for their KIF11 target sites (with minimal off-targets) and exhibit high editing levels, they may still not be suitable gRNAs for the selection mechanisms described herein as they may not induce toxic indels that result in sufficient malfunction of KIF11, which in turn would lead to cell death if homologous recombination of a rescue knock-in cassette does not occur. The percentage editing was measured two days following transfection and was determined by ICE assays (as described in Hsiau et al., August 2019). FIG. 11C and FIG. 11D (representing an additional experiment where RSQ33509 was again used for editing at the KIF11 locus) show the relative integrated “cargo” (GFP) expression intensity of the edited cells.

### Example 9: Knock-In of Cargo at Essential Gene Loci Using a Viral Vector

[0618] The present example describes use of the gene editing methods described herein comprising viral vector transduction of a cell population.

[0619] The target cells described herein are collected from a donor subject or a subject in need to therapy (e.g., a patient). Following an appropriate sorting, culturing, and/or differentiation process, target cells are transduced with at least one AAV vector comprising a nucleotide sequence comprising a gRNA, a suitable nuclease, and/or a suitable rescue construct. Cells are sorted using flow cytometry to determine successful transduction, editing, integration, and/or expression events.

[0620] A population of hematopoietic stem cells are transduced with an AAV vector (e.g., AAV6) comprising GAPDH targeting RNP (including Cas12a of SEQ ID NO: 62 and gRNA RSQ22337 of SEQ ID NO: 95) and PLA1593 (comprising donor template SEQ ID NO: 44). Successful transduction, editing, knock-in cassette integration, and/or expression events are determined using flow cytometry, as described herein. Following AAV transduction, a large proportion of the cells are edited at the GAPDH locus by the RNP and have integrated the knock-in cassette via HDR. A population of hematopoietic stem cells are transduced with an AAV vector (e.g., AAV6) comprising TBP targeting RNP (including Cas12a of SEQ ID NO: 62 and gRNA RSQ33503 of SEQ ID NO: 149) and PLA1616 (comprising donor template SEQ ID NO: 49). Successful transduction, editing, integration, and/or expression events are determined using flow cytometry, as described herein. Following AAV transduction, a large proportion of the cells are edited at the TBP locus by the RNP and have integrated the knock-in cassette via HDR.

[0621] A population of T cells are transduced with an AAV vector (e.g., AAV6) comprising GAPDH targeting RNP (including Cas12a of SEQ ID NO: 62 and gRNA RSQ22337 of SEQ ID NO: 95) and PLA1593 (comprising donor template SEQ ID NO: 44). Successful transduction, editing, knock-in cassette integration, and/or expression events are determined using flow cytometry, as described herein. Following AAV transduction, a large proportion of the cells are edited at the GAPDH locus by the RNP and have integrated the knock-in cassette via HDR. A population of T cells are transduced with an AAV vector (e.g., AAV6) comprising TBP targeting RNP (including Cas12a of SEQ ID NO: 62 and gRNA RSQ33503 of SEQ ID NO: 149) and PLA 1616 (comprising donor template SEQ ID NO: 49). Successful transduction, editing, integration, and/or expression events are determined using flow cytometry, as described herein. Following AAV transduction, a large proportion of the cells are edited at the TBP locus by the RNP and have integrated the knock-in cassette via HDR.

[0622] A population of NK cells are transduced with an AAV vector (e.g., AAV6) comprising GAPDH targeting RNP (including Cas12a of SEQ ID NO: 62 and gRNA RSQ22337 of SEQ ID NO: 95) and PLA1593 (comprising donor template SEQ ID NO: 44). Successful transduction, editing, knock-in cassette integration, and/or expression events are determined using flow cytometry, as described herein. Following AAV transduction, a large proportion of the cells are edited at the GAPDH locus by the RNP and have integrated the knock-in cassette via HDR. A population of NK cells are transduced with an AAV vector (e.g., AAV6) comprising TBP targeting RNP (including Cas12a of SEQ ID NO: 62 and gRNA RSQ33503 of SEQ ID NO: 149) and PLA1616 (comprising donor template SEQ ID NO: 49). Successful transduction, editing, knock-in cassette integration, and/or expression events are determined using flow cytometry, as described herein. Following AAV transduction, a large proportion of the cells are edited at the TBP locus by the RNP and have integrated the knock-in cassette via HDR.

[0623] A population of tumor-infiltrating lymphocytes (TILs) are transduced with an AAV vector (e.g., AAV6) comprising GAPDH targeting RNP (including Cas12a of SEQ ID NO: 62 and gRNA RSQ22337 of SEQ ID NO: 95) and PLA1593 (comprising donor template SEQ ID NO: 44). Successful transduction, editing, knock-in cassette integration, and/or expression events are determined using flow cytometry, as described herein. Following AAV transduction, a large proportion of the cells are edited at the GAPDH locus by the RNP and have integrated the knock-in cassette via HDR. A population of tumor-infiltrating lymphocytes (TILs) are transduced with an AAV vector (e.g., AAV6) comprising TBP targeting RNP (including Cas12a of SEQ ID NO: 62 and gRNA RSQ33503 of SEQ ID NO: 149) and PLA1616 (comprising donor template SEQ ID NO: 49). Successful transduction, editing, knock-in cassette integration, and/or expression events are determined using flow cytometry, as described herein. Following AAV transduction, a large proportion of the cells are edited at the TBP locus by the RNP and have integrated the knock-in cassette via HDR.

[0624] A population of neurons are transduced with an AAV vector (e.g., AAV6) comprising GAPDH targeting RNP (including Cas12a of SEQ ID NO: 62 and gRNA RSQ22337 of SEQ ID NO: 95) and PLA1593 (comprising donor template SEQ ID NO: 44). Successful transduction, editing, knock-in cassette integration, and/or expression events are determined using flow cytometry, as described herein. Following AAV transduction, a large proportion of the cells are edited at the GAPDH locus by the RNP and have integrated the knock-in cassette via HDR. A population of neurons are transduced with an AAV vector (e.g., AAV6) comprising TBP targeting RNP (including Cas12a of SEQ ID NO: 62 and gRNA RSQ33503 of SEQ ID NO: 149) and PLA1616 (comprising donor template SEQ ID NO: 49). Successful transduction, editing, knock-in cassette integration, and/or expression events are determined using flow cytometry, as described herein. Following AAV transduction, a large proportion of the cells are edited at the TBP locus by the RNP and have integrated the knock-in cassette via HDR.

### Example 10: Knock-In of Cargo at Essential Gene Loci Using a Viral Vector

[0625] The present example describes gene editing of populations of T cells using methods described herein comprising viral vector transduction of populations of T cells. The methods described herein can be applied to other cell types as well, such as other immune cells.

[0626] T cells were thawed in a bead bath as known in the art and were removed from the bath on day two. Cells were electroporated on day four after thawing, in brief 250,000 T cells per well in a Lonza 96-well cuvette were suspended in buffer P2 and electroporated using pulse code CA-137 with varying concentrations of RNP comprising gRNA RSQ22337 (SEQ ID NO: 95) and Cas12a (SEQ ID NO: 62) targeting the GAPDH gene (4 μM RNP, 2 μM RNP, 1 μM RNP, or 0.5 μM RNP). Appropriate media was added to cells immediately after electroporation and cells were allowed to recover for 15 minutes. AAV6 viral particles comprising a donor plasmid construct containing a knock-in cassette with a GFP cargo were then added to T cells at varying multiplicity of infection (MOI) concentrations (5E4, 2.5E4, 1.25E4, 6.25E3, 3.13E3, 1.56E3, or 7.81E2). The donor plasmid was designed as described in Example 2, with a 5′ codon-optimized coding portion of GAPDH exon 9 optimized to prevent further binding of the gRNA targeting domain sequence of the guide RNA (RSQ22337)), an in-frame sequence encoding the P2A self-cleaving peptide (“P2A”), an in-frame coding sequence for GFP (“Cargo”), a stop codon and polyA signal sequence. T cells were split two days later, and then every 48 hours until they were analyzed by flow cytometry. T cells were sorted using flow cytometry seven days post electroporation to determine successful transduction, transformation, editing, knock-in cassette integration, and/or expression events (see FIG. 14, FIG. 15, FIG. 16A, and FIG. 16B). As shown in FIG. 14, populations of T cells were transduced with 4 μM RNP, 2 μM RNP, 1 μM RNP, or 0.5 μM RNP, at various AAV6 multiplicity of infection (MOI) (5E4, 2.5E4, 1.25E4, 6.25E3, 3.13E3, 1.56E3, or 7.81E2). High proportions of GFP integration at the GAPDH gene were observed in T cell populations transduced/transformed with all RNP concentrations at 5E4 AAV6 MOI and were observed with RNP concentrations greater than 1 μM when cells were transduced with AAV6 MOI as low as 1.25E4 (see FIGS. 14 and 16A). Control experiments with no AAV transduction resulted in T cell populations that displayed no GFP integration events (see FIG. 16B). T cell viability was measured four days after cells were transformed with RNPs and AAV6 at various MOI (FIG. 15).

[0627] Furthermore, knock-in efficiencies using methods described herein were compared to optimized versions of methods known in the art. In brief, T cell populations were transduced with AAV6 vector comprising a donor template suitable for knock-in of GFP at the GAPDH gene as described herein, and were transformed with gRNA RSQ22337 (SEQ ID NO: 95) and Cas12a (SEQ ID NO: 62) as described above; alternatively, T cell populations were subject to highly optimized GFP knock-in at the TRAC locus using AAV6 vector transduction (see e.g., Vakulskas et al. A high-fidelity Cas9 mutant delivered as a ribonucleoprotein complex enables efficient gene editing in human hematopoietic stem and progenitor cells. Nat Med. 2018; 24(8): 1216-1224). Flow cytometry was utilized to measure knock-in efficiency (determined by percentage of T cell population expressing GFP, measured 7 days post-electroporation). Knock-in rates at the TRAC locus were high (˜50%) when compared to publicly described integration frequencies for similar methodologies, however, knock-in efficiency at the GAPDH gene using methods described herein facilitated by AAV6 transduction were significantly (p=0.0022 using unpaired t-test) higher (˜68%) (see FIG. 17A). The same RNP concentration, AAV6 MOI, and homology arm lengths were utilized in both experiments, averaged results from three independent biological replicates are shown (see FIG. 17A). Thus, the methods described herein can be used to isolate a population of modified cells, such as immune cells like T cells, that highly express a gene of interest relative to other gene knock-in methods.

### Example 11: CD16 Knock-In iPSCs Give Rise to Edited iNKs with Enhanced Function

[0628] The present example describes use of gene editing methods described herein to create modified immune cells suitable for killing cancer cells.

[0629] PSCs were edited using the exemplary system illustrated in FIGS. 3A, 3B, and 3C, and described in Example 2. In brief, the GAPDH gene was targeted in iPSCs using AsCpf1 (SEQ ID NO: 62), and a guide RNA (RSQ22337) (SEQ ID NO: 95), resulting in a double-strand break towards the 5′ end of the last exon of GAPDH (exon 9). The CRISPR/Cas nuclease and guide RNA were introduced into cells by nucleofection (electroporation) of a ribonucleoprotein (RNP) according to known methods. The cells were also contacted with a double stranded DNA donor template (dsDNA plasmid, comprising donor template SEQ ID NO: 205) that included a donor template comprising in 5′-to-3′ order, a 5′ homology arm approximately 500 bp in length (comprising a 3′ portion of exon 8, intron 8, and a 5′ codon-optimized coding portion of exon 9 optimized to prevent further binding of the gRNA targeting domain sequence of the guide RNA (RSQ22337)), an in-frame sequence encoding the P2A self-cleaving peptide (“P2A”), an in-frame coding sequence for CD16 (“Cargo”) (a non-cleavable CD 16; SEQ ID NO: 165), a stop codon and polyA signal sequence, and a 3′ homology arm approximately 500 bp in length (comprising a coding portion of exon 9 including a stop codon, the 3′ non-coding exonic region of exon 9, and a portion of the downstream intergenic sequence) (as shown in FIG. 3B).

[0630] The cargo gene CD16 was successfully integrated into the GAPDH gene of iPSCs at high efficiencies using the selection systems described herein. FIG. 18A shows the efficiency of CD16-encoding “cargo” integration in the GAPDH gene at 0 days post-electroporation and at 19 days post-electroporation in iPSCs transformed with RNPs at a concentration of 4 μM and the dsDNA plasmid encoding CD16, or in “unedited cells” that were not transformed with the dsDNA plasmid. Knock-in was measured in bulk edited CD16 KI cells using ddPCR targeting the 5′ or 3′ position of the knock-in “cargo” using a primer in the 5′ of the gRNA target site or a primer in the 3′ of the site in the poly A region, increasing the reliability of the result. As shown in FIG. 18A, CD16 was stably knocked-in and present in bulk edited cell populations more than two weeks following electroporation and targeted integration of the knock-in cassette.

[0631] From bulk edited cell populations, single cells were propagated to homogenize genotypes. Shown in FIG. 18B are four edited cell populations: homozygous clone 1, homozygous clone 2, heterozygous clone 3, and heterozygous clone 4. The homozygous clones contained two alleles of the GAPDH gene that comprised CD16 knock-in, while heterozygous clones contained one allele of the GAPDH gene that comprised CD16 knock-in (measured using ddPCR of the 5′ and 3′ positions of the knock-in cargo).

[0632] Following confirmation of CD16-encoding “cargo” integration at the GAPDH gene, homogenized cell lines were differentiated into Natural Killer (NK) immune cells using spin embryoid body methods as known in the art. In brief, iPSCs were placed in an ultra-low attachment 96-well plate at 5,000 to 6,000 cells per well in order to form embryoid bodies (EBs). On day 11 EBs were transferred to a flask where they remain for the remainder of the experiment (see Ye Li et al., Cell Stem Cell. 2018 Aug. 2; 23(2): 181-192.e5). At day 32 of the differentiation process, cells were analyzed using flow cytometry methods known in the art. Following standard control gating experiments (see Ye Li et al., Cell Stem Cell. 2018 Aug. 2; 23(2): 181-192.e5), the differentiation process was analyzed using expression of markers CD56 and CD45, following this, co-expression of markers CD56 and CD16 was measured. As shown in FIG. 19A-19D, in general, cells that were positive for CD56 expression were also positive for CD16 expression (98%, 99%, 97.8%, and 99.9% respectively), indicating that both homozygous and heterozygous TI clones had stable and robust CD16 expression levels.

[0633] These differentiated iNK cells comprising knock-in of the gene of interest (CD16) at the GAPDH gene were then subject to challenge by various cancer cell lines to determine their cytotoxic capacity. An exemplary 3D solid tumor killing assay is depicted in FIG. 20. In brief, spheroids were formed by seeding 5,000 NucLight Red labeled SK-OV-3 cells in 96 well ultra-low attachment plates. Spheroids were incubated at 37° C. before addition of effector cells (at different E:T ratios) and any optional agents (e.g., cytokines, antibodies, etc.), spheroids were subsequently imaged every 2 hours using the Incucyte S3 system for up to 600 hours. Data shown are normalized to the red object intensity at time of effector addition. Normalization of spheroid curves maintains the same efficacy patterns observed in non-normalized data. Using this assay, the cytotoxicity of iNKs differentiated from iPSCs comprising knock-in of CD16 at the GAPDH gene was measured.

[0634] As shown in FIGS. 21A and 21B, both homozygous edited iNK lines and both heterozygous edited iNK lines comprising CD16 knocked-in at the GAPDH gene were capable of reducing the size of SK-OV-3 spheroids more effectively than unedited iNK control cells (WT PCS) or control cells with GFP knocked-in to the GAPDH gene (WT GFP KI) (averaged data from 2 assays). The edited homozygous and heterozygous iNK cells comprising CD16 at GAPDH also reduced the size of SK-OV-3 spheroids more effectively than control cells with GFP knocked-in to the GAPDH gene (data not shown). Introduction of 10 μg/mL of the antibody trastuzumab greatly enhanced the killing capacity of the CD16 KI iNKs when compared to control cells, likely as a function of increased antibody dependent cellular cytotoxicity (ADCC) due to increased FcγRIII (CD16) expression levels (see FIG. 37A). The results of a number of solid tumor killing assays were plotted against the CD16 expression levels of CD16 KI edited iNKs (derived from bulk edited iPSCs or singled edited iPSCs). At an E:T ratio of 3.16:1, there is a correlation shown between the percentage of a cell population expressing CD16, and the amount of cell killing that occurred (see FIG. 23).

[0635] To further elucidate the functionality of the edited iNKs, the cells were subjected to repeated exposure to tumor cells, and the ability of the edited iNKs to kill tumor targets repeatedly over a multiday period was analyzed in an in vitro serial killing assay. Results of this experiment are depicted in FIG. 22. At day 0 of the assay, 10×10⁶ Raji tumor cells (a lymphoblast-like cell line of hematopoietic origin) and 2×10⁵ iNKs were plated in each well of a 96-well plate in the presence or absence of 0.1 μg/mL of the antibody rituximab. At approximately 48 hour intervals, a bolus of 5×10³ Raji tumor cells was added to re-challenge the iNK population. As shown in FIG. 22, the edited iNK cells (CD16 KI iNK heterozygous or homozygous) exhibited continued killing of Raji cells after multiple challenges with Raji tumor cells (up to 598 hours), whereas unedited iNK cells were limited in their serial killing effect. The data show that iNK cells comprising homozygous or heterozygous CD16 KI at GAPDH results in prolonged and enhanced tumor cell killing. Furthermore, the efficacy of heterozygous CD16 KI iNKs highlights the potential for biallelic insertion of two different knock-in cassettes, e.g., comprising CD16 in one allele and a different gene of interest in the other allele of a suitable essential gene (e.g., GAPDH, TBP, KIF11, etc.).

### Example 12: Knock-In of Immunologically Relevant Sequences at a Suitable Essential Gene Locus (Monocistronic or Bicistronic)

[0636] Positive targeted integration events at the GAPDH gene and cellular phenotypes were noted for integration of GFP, CD47, or CD16 as described above in Example 2 and Example 11. Additional or alternative cargo sequences may be incorporated into the GAPDH gene or other suitable essential genes as described herein with high integration rates. The essential gene GAPDH was targeted in iPSC cells using an RNP containing AsCpf1 (SEQ ID NO: 62) and a guide RNA (RSQ22337; SEQ ID NO: 95), resulting in a double-strand break towards the 5′ end of the last exon of GAPDH (exon 9), as described in Example 2. A donor plasmid containing a knock-in cassette with the cargo of interest was also electroporated with the RNP. As shown in FIG. 24A, the targeted integration (TI) rates at the GAPDH gene for cargos such as a) CD16, b) a CAR suitable for expression in NK cells, or c) biallelic GFP/mCherry, were all greater than 40% when assayed in two independent iPSC clonal lines when measured using ddPCR. As shown in FIG. 24B, the targeted TI rates at the GAPDH gene for a CXCR2 cargo was at least 29.2% of bulk edited iPSCs (expression determined using flow cytometry), while surface expression of CXCR2 was observed in approximately 8.5% of the bulk edited iPSCs (expression determined using flow cytometry). By contrast, unedited iPSCs very small amounts of CXCR2 (approximately 1%) by flow cytometry (data not shown).

[0637] An exemplary ddPCR experiment was used to measure the targeted integration (TI) rates as follows. In brief, TI was measured using a universal set of primers that captures both the 5′ homology arm and 3′ poly A tail for the GAPDH terminal exon region, and can detect cargos independent of the particular sequence of the specific cargo. The 5′ CDN primer and 3′ PolyA primer and FAM fluorophore probes are made in combination. An appropriate reference gene probe is a TTC5 HEX probe. For the reaction, probes, genomic DNA, BioRad master mix, and 2× control buffer were mixed together in ratios consistent with manufacturer recommendations. First, genomic DNA was placed in the BioRad 96 well plate (9.2 μl total genomic DNA+water), next, master mix with primer probes sets (13.8 μl per well) were added. Water controls comprised a 5′ primer probe set master mix in one well, and a 3′ primer probe set master mix in a different well. For blank well controls, a 50/50 mix of 2× control buffer and water (25 μl total) was added. The auto droplet generator was then prepared and run. Once droplets were generated, the ddPCR plates were sealed at 180° C. and then placed in a thermocycler for amplification. 5′ CDN primer: CATCGCATTGTCTGAGTAGGTGTC (SEQ ID NO: 219), 3′ PolyA primer: TGCCCACAGAATAGCTTCTTCC (SEQ ID NO: 220), FAM probe: TCCCCTCCTCACAGTTGCCA (SEQ ID NO: 221), TTC5 reference gene forward primer: GGAGAAAGTGTCCAGGCATAAG (SEQ ID NO: 222), TTC5 reference gene reverse primer: CTCCATCCCACTATGACCATTC, (SEQ ID NO: 223), TTC5 FAM probe: AGTTTGTGTCAGGATGGGTGGT (SEQ ID NO: 224).

[0638] Next, the cargo integration and selection methods described herein were tested using a number of bicistronic knock-in cassettes that contained CD16 and an NK suitable CAR in different 5′-to-3′ orders (e.g., CD16 followed by the CAR, or the CAR followed by CD16) and separated by a P2A or IRES sequence. The essential gene GAPDH was targeted in iPSC cells using an RNP containing AsCpf1 (AsCas12a, (SEQ ID NO: 62)) and a guide RNA (RSQ22337; SEQ ID NO: 95), resulting in a double-strand break towards the 5′ end of the last exon of GAPDH (exon 9), as described in Example 2. A donor plasmid containing each of the knock-in cassettes depicted in FIG. 25 was also electroporated with the RNP. As shown in FIG. 25, the TI rates for the bicistronic constructs comprising CD16 and the NK suitable CAR ranged from 20-70% when measured in the bulk edited cells using ddPCR at day 0 post-transformation. In addition, a membrane bound IL-15 (mbIL-15) cargo gene (a fusion comprising IL-15 linked to a Sushi domain and a full-length IL-15Rα, as depicted in FIG. 26) was also knocked into the GAPDH locus using RNPs comprising (RSQ22337) and Cas12a at a concentration of 4 μM and the dsDNA plasmid encoding mbIL-15 at 5 μg (PLA1632; comprising donor template SEQ ID NO: 45) to determine if additional genes of interest could be integrated into an essential gene at high levels within a population of edited cells. FIG. 25 shows that the mbIL-15 cargo was knocked into the GAPDH locus at a percentage TI of greater than 50% as measured by ddPCR (day 0 post-transformation). Thus, the methods described herein can be used to isolate populations of edited cells, such as iPSCs, that have very high levels of a gene of interest knocked into an essential gene locus, such as GAPDH.

### Example 13: IL-15 and/or IL-15/IL15-Rα Knock-In iPSCs Give Rise to Edited iNKs with Enhanced Function

[0639] The present example describes use of gene editing methods described herein to create modified immune cells suitable for cancer cell killing.

[0640] PSCs were edited using the exemplary system illustrated in FIGS. 3A, 3B, and 3C, and described in Example 2. In brief, the GAPDH gene was targeted in iPSCs using RNPs containing AsCpf1 (AsCas12a, SEQ ID NO: 62), and a guide RNA (RSQ22337; SEQ ID NO: 95), resulting in a double-strand break towards the 5′ end of the last exon of GAPDH (exon 9). The CRISPR/Cas nuclease and guide RNA were introduced into cells by nucleofection (electroporation) of a ribonucleoprotein (RNP) according to known methods. The cells were also contacted with a double stranded DNA donor template (dsDNA plasmid) that included a donor template comprising in 5′-to-3′ order, a 5′ homology arm approximately 500 bp in length (comprising a 3′ portion of exon 8, intron 8, and a 5′ codon-optimized coding portion of exon 9 optimized to prevent further binding of the gRNA targeting domain sequence of the guide RNA (RSQ22337)), an in-frame sequence encoding the P2A self-cleaving peptide (“P2A”), an in-frame coding sequence for mbIL-15 as shown in FIG. 32 (“Cargo”) (SEQ ID NO: 172), a stop codon and poly A signal sequence, and a 3′ homology arm approximately 500 bp in length (comprising a coding portion of exon 9 including a stop codon, the 3′ non-coding exonic region of exon 9, and a portion of the downstream intergenic sequence) (as shown in FIG. 3B). The 5′ and 3′ homology arms flanking the cargo coding sequence of the donor template were designed to correspond to sequences located on either side of the endogenous stop codon in the genome of the cell.

[0641] The cargo gene mbIL-15 (as shown in FIG. 26) was successfully integrated into the GAPDH gene of iPSCs at high efficiencies using the selection systems described herein (see Example 12). FIG. 25 shows the efficiency of the mbIL-15-encoding “cargo” in GAPDH at 0 days post-electroporation in iPSCs transformed with RNPs comprising (RSQ22337) and Cas12a at a concentration of 4 μM and the dsDNA plasmid encoding mbIL-15 at 5 μg (PLA1632; comprising donor template SEQ ID NO: 45). Genomic DNA was extracted approximately seven days post nucleofection. After genomic DNA extraction ddPCR was performed.

[0642] Two separate populations of the bulk edited mbIL-15 KI iPSC cells were then differentiated into iNK cells and the TI rates were measured using ddPCR at day 28 of the iNK differentiation process. FIG. 27 shows that TI integrate rates for these edited iNK cell populations ranged from 10-15%. While the TI rates in the iNK populations decreased when compared to the TI at day 0 post-electroporation of iPSCs, the TI integration levels within these cell populations remained significant. At day 32 post-differentiation initiation, flow cytometry was conducted to determine the proportion of cells expressing CD56 and exogenous IL-15Rα in these edited iNK cell populations (see FIG. 28A). The CD56 and CD16 co-expression levels were also determined in these edited iNK cell populations (see FIG. 28B). The bulk edited mbIL-15 KI cell populations were also analyzed for markers of differentiation by flow cytometry on day 32, day 39, day 42, and day 49 post-differentiation initiation (see FIG. 28C).

[0643] At day 39 following the initiation of differentiation from the edited iPSCs into iNKs, cells were challenged in 3D spheroid killing assays as described in Example 11 and depicted in FIG. 20. Using this assay, the cytotoxicity of iNKs differentiated from iPSCs comprising knock-in of mbIL-15 at the GAPDH gene was measured (see FIG. 30A). Cells were tested in the presence or absence of 5 ng/ml exogenous IL-15. As shown in Table 18 and FIG. 30A, mbIL-15 KI iNK cells (Mb IL-15 S1 and Mb IL-15 S2 populations) exhibited more efficient tumor cell killing when compared to unedited parental cells differentiated into iNKs (“WT” PCS, 1 and 2). Of note, mbIL-15 KI iNK cells exhibited better tumor cell killing in the absence of exogenous IL-15 relative to WT iNK cells in the absence of endogenous IL-15 at lower E:T ratios. The mbIL-15 KI iNK cells also exhibited better tumor cell killing in the presence of low concentrations of exogenous IL-15 (5 ng/mL) when compared to unedited WT iNK cells in the presence of the same concentration of exogenous IL-15. In addition, at higher E:T ratios, mbIL-15 KI iNKs outperformed WT iNKs without the addition of exogenous IL-15 (see FIG. 30B). The above described 3D spheroid killing assay was repeated on mbIL-15 KI iNKs and control cells on day 42 and day 49, and for test cells only on day 56, and day 63 post-differentiation initiation, results for these assays in the presence or absence of 5 ng/ml IL-15 is depicted in FIGS. 30C and 30D respectively. These results support the conclusion of mbIL-15 KI iNKs persisting and facilitating tumor cell killing in the absence or presence of exogenous IL-15.

[0644] In addition, mbIL-15 KI iNK cells at later stages of differentiation (day 63 post-differentiation initiation for Set 1 (S1) and day 56 post-differentiation initiation for Set 2 (S2)) were also challenged in 3D spheroid killing assays as described above. Cells were tested in the presence or absence of 10 μg/ml Herceptin and/or 5 ng/mL exogenous IL-15. As shown in Table 19 and FIG. 31A-31D, mbIL-15 KI iNK cells exhibited high tumor cell killing efficiency, particularly when coupled with antibody therapy. At day 63, all mbIL-15 KI iNK cells did not express detectable levels of IL-15Ra; at Day 56, only one mbIL-15 KI iNK cell line (Mb IL-15 S2 R2) expressed detectable levels of IL-15Ra (data not shown).

[0645] The cumulative results of certain 3D spheroid killing assays for mbIL-15 KI iNKs and control WT iNK cells is depicted in FIG. 32. Two independent bulk edited populations of iPSCs (Set 1 (S1) and Set 2 (S2)) comprising mbIL-15 knock-in at the GAPDH gene were differentiated into iNK cells (day 39 and 49 of iPSC differentiation for Set 1, and day 42 of iPSC differentiation for Set 2) These iNK cells significantly reduced tumor cell spheroid size when compared to differentiated WT parental cell iNKs in the absence of exogenous IL-15 (P=0.034, +/− standard deviation, unpaired t-test). The differentiated knock-in mbIL-15 iNK cells also trended towards significant reduction of tumor cell spheroid size when compared to differentiated WT parental cells in the presence of 5 ng/ml exogenous IL-15 (P=0.052, +/− standard deviation, unpaired t-test). These results show that populations of iNK cells comprising mbIL-15 knock-in at the GAPDH locus using the methods described herein perform better in killing tumor cells in the absence of exogenously added IL-15 compared to populations of unedited iNK cells.

TABLE 18
mbIL-15 KI iNK 3D spheroid killing with IL-15

| | EC50 with | EC50 with |
|---|---|---|
| Cell Line | 0 ng/mL IL-15 | 5 ng/mL IL-15 |
| Mb IL-15 S1 | 9.575 | 1.648 |
| Mb-IL-15 S2 | 11.05 | 1.646 |
| WT iNK (PCS) 1 | 20.71 | 4.378 |
| WT iNK (PCS) 2 | 20.99 | 3.213 |

TABLE 19
mbIL-15 KI iNK 3D spheroid killing with Herceptin and/or IL-15

| | | | EC50 with | EC50 with |
|---|---|---|---|---|
| | | | 5 ng/ml | 5 ng/ml |
| | EC50 with | EC50 with | IL-15 and | IL-15 and |
| | 0 μg/mL | 10 μg/mL | 0 μg/mL | 10 μg/mL |
| Cell Line | Herceptin | Herceptin | Herceptin | Herceptin |
| Mb IL-15 Set1 Rep1 | 2.055 | 0.6936 | 0.16515 | 0.1423 |
| Mb IL-15 Set1 Rep2 | 1.701 | 0.5903 | 0.1794 | 0.1247 |
| Mb IL-15 Set1 Rep2.1 | 1.848 | 0.9570 | 0.3187 | 0.1153 |
| Mb IL-15 Set2 Rep1 | 1.291 | 1.589 | 0.2339 | 0.2096 |
| Mb IL-15 Set2 Rep2 | 0.8026 | 0.3783 | 0.3605 | 0.2778 |

[0646] In addition, the mbIL-15 KI iNK cells at later stages of differentiation (day 63 post-differentiation initiation for Set 1 (S1) and day 56 post-differentiation initiation for Set 2 (S2)) were also challenged with hematological cancer cells (e.g., Raji cells). Two biological replicate populations of mbIL-15 KI NK cells (S1 and S2) were tested in the presence or absence of 10 μg/ml rituximab. As shown in FIG. 29, mbIL-15 KI iNK cells exhibited high tumor cell killing efficiency, particularly when coupled with antibody therapy. This killing capacity of these cells is significant, as Raji cells are naturally resistant to NK cells, but the mbIL-15 KI iNK cells in combination with antibody were able to find and kill these cells.

### Example 14: Knock-In of Multicistronic CD16, IL-15, and/or IL-15Rα Sequences at a Suitable Essential Gene Loci

[0647] As described above in Example 2, genes of interest (GOI) may be integrated as a cargo sequence into suitable essential gene loci using methods described herein. In certain embodiments, multiple GOIs may be combined into a bicistronic or multicistronic knock-in cargo sequence. FIG. 33A depicts a portion of PLA1829 (comprising donor template SEQ ID NO: 208) comprising a bicistronic knock-in cargo sequence that was utilized for targeted integration at the GAPDH gene comprising an IL-15 peptide sequence, an IL-15Rα peptide sequence, and a GFP peptide sequence (SEQ ID NOs: 187, 189, and 195 respectively). Each of these peptide sequences were separate by a P2A sequence. Depicted in FIG. 33B is a portion of PLA1832 (comprising donor template SEQ ID NO: 209) comprising a multicistronic knock-in cargo sequence that was utilized for targeted integration at the GAPDH gene comprising a CD16 peptide sequence, an IL-15 peptide sequence, and an IL-15Rα peptide sequence (SEQ ID NOs:184, 187, and 189 respectively). Each of these peptide sequences were separate by a P2A sequence. Depicted in FIG. 33C is a portion of PLA1834 (comprising donor template SEQ ID NO: 212) comprising a bicistronic knock-in cargo sequence that was utilized for targeted integration at the GAPDH gene comprising a CD16 peptide sequence, and an mbIL-15 peptide sequence (an IL-15 sequence fused to an IL-15Rα sequence as depicted in FIG. 26) (SEQ ID NOs: 184 and 190 respectively) separated by a P2A sequence.

[0648] The knock-in cargo sequences described in FIG. 33A-33C are comprised within Plasmids 1829, 1832, and 1834 respectively (comprising donor template SEQ ID NOs: 208, 209, and 212). PSCs were edited using the exemplary system illustrated in FIGS. 3A, 3B, and 3C, and described in Example 2. In brief, the GAPDH gene was targeted in iPSCs using AsCpf1 (AsCas12a (SEQ ID NO: 62)) and a guide RNA (RSQ22337 (SEQ ID NO: 95)), resulting in a double-strand break towards the 5′ end of the last exon of GAPDH (exon 9). The CRISPR/Cas nuclease and guide RNA were introduced by nucleofection (electroporation) of a ribonucleoprotein (RNP) according to known methods. The cells were also contacted with a double stranded DNA donor template (dsDNA plasmid (PLA1829, PLA1832, or PLA1834 respectively)) that included a donor template (SEQ ID NO: s: 208, 209, and 212) comprising in 5′-to-3′ order, a 5′ homology arm approximately 500 bp in length (comprising a 3′ portion of exon 8, intron 8, and a 5′ codon-optimized coding portion of exon 9 optimized to prevent further binding of the gRNA targeting domain sequence of the guide RNA (RSQ22337)), an in-frame sequence encoding the P2A self-cleaving peptide (“P2A”), an in-frame coding sequence as described above (“Cargo”), a stop codon and polyA signal sequence, and a 3′ homology arm approximately 500 bp in length (comprising a coding portion of exon 9 including a stop codon, the 3′ non-coding exonic region of exon 9, and a portion of the downstream intergenic sequence) (as shown in FIG. 3B). Four unique nucleofection events were conducted (corresponding to RNP and PLA1829, RNP and PLA1832, RNP and PLA1834, and RNP with no plasmid control) and cells were plated at clonal density. Colonies were propagated for analysis of TI using ddPCR.

[0649] Following TI, transformed iPSCs (edited clones) with KI of PLA1829, PLA1832 or PLA1834 cargo sequences, or control WT parental cells transformed with RNP alone, were analyzed using flow cytometry seven days after transformation (see FIGS. 34A and 34B). The levels of GFP and IL-15Rα expression were measured in bulk edited iPSC populations. As shown in FIG. 34A, approximately 57% of cells transformed with PLA1829 expressed both IL-15Rα and GFP, while control cells had no GFP expression and approximately 14.4% IL-15Rα expression levels. As shown in FIG. 34B, approximately 33.1% of cells transformed with PLA1832, and approximately 57.2% of cells transformed with PLA1834 expressed IL-15Rα; neither of these cell populations displayed appreciable GFP levels, as expected as the respective donor templates did not comprise GFP. The expression of these cargo proteins can be used as a proxy for determining successful transformation, editing, and/or integration.

[0650] FIG. 35A-35C depicts the genotypes for 24 of the colonies transformed with PLA1829, PLA1832, or PLA1834 (comprising donor template SEQ ID NOs: 208, 209, and 212) respectively and compared to wild-type cells. Measured with ddPCR, cells with ˜85-100% TI are categorized as homozygous, 40-60% are categorized as heterozygous, while those with very low or no signal are categorized as wild type. The colonies were propagated after transformation, and cell populations were then differentiated to iNK cells using a spin embryoid method as known in the art. Shown in FIG. 36A-36D are exemplary flow cytometry results measuring the percentage of cells expressing IL-15Rα and/or CD16, and the median fluorescence intensity (MFI) of IL-15Rα and/or CD16 at day 32 of the iNK differentiation process. As shown in FIG. 36A, transformation with PLA1829, PLA1832, or PLA1834 enabled surface expression of IL-15Rα in heterozygous or homozygous colonies at significantly higher proportions than iNKs differentiated from control WT parental cells. As shown in FIG. 36B, transformation with PLA1832 or PLA1834 enabled surface expression of CD16 in heterozygous or homozygous colonies at significantly higher proportions than iNKs differentiated from control WT parental cells, as cells transformed with the PLA1829 cargo sequence do not comprise a CD16 cargo sequence. As shown in FIG. 36C, transformation with PLA1834 enabled higher MFI of IL-15Rα in heterozygous or homozygous colonies when compared to iNKs differentiated from control WT parental cells, or cells transformed with PLA1829 or PLA1832. As shown in FIG. 36D, transformation with PLA1832 or PLA1834 enabled surface expression of CD16 in heterozygous or homozygous colonies. These data show that the methods described herein can be used to knock-in a multicistronic cargo containing numerous genes of interest into an essential gene such as GAPDH, leading to expression of the genes of interest in the edited cells. These data also clearly demonstrate the constitutive nature of cargo expression from the GAPDH locus.

[0651] The differentiated iNK cells were also used in lactate dehydrogenase (LDH) killing assays, and iNK cells were assessed for surface expression of CD16 by flow cytometry, before and after the cytotoxicity assay (E:T ratio of 1 or 2.5). As shown in FIG. 36F (E:T ratio of 2.5), in the absence of trastuzumab (Herceptin), WT cells and cells transformed with PLA1829 (without CD16 KI) showed small decreases in the surface level expression of CD16 after coming into contact with the SK-OV-3 cells in the LDH assay while cells transformed with PLA1834 (and thus having CD16 KI) showed minimal reduction. In the presence of trastuzumab, cells transformed with PLA1834 demonstrated a similar minimal reduction in the level of CD16 after coming into contact with the SK-OV-3 cells in the LDH assay; however, a marked difference in CD16 surface expression was observed for WT cells and cells transformed with PLA1829 (without CD16 KI) after coming into contact with the SK-OV-3 cells in the LDH assay (FIG. 36G, E:T ratio of 2.5). Further experimental replicates confirmed that homozygous colonies of cells transformed with PLA1834 largely maintained CD16 surface expression after contact with SK-OV-3 cells in the LDH assay, in the absence or presence of trastuzumab, whereas unedited (WT) parental cells displayed substantial decreases in CD16 surface expression after contact with SK-OV-3 cells (FIG. 36H). Overall, the results show that KI of a cleavable CD16 construct at GAPDH can lead to high levels of CD16 surface expression in KI iNK cells, and there is minimal CD16 shedding from the CD16 KI iNK cells after they contact tumor cells. Additionally, as shown in FIG. 36I, homozygous PLA1834-transformed iNK cells exhibited greater cytotoxicity than unedited (WT) iNK cells in the presence and absence of trastuzumab at E:T ratios of 1 and 2.5 in the LDH assay.

[0652] In addition, differentiated iNK cells (unedited (WT) cells) and homozygous colonies of PLA1834-transformed (CD16^{+/+}/mbIL-15^{+/+}) cells were used in 3D tumor spheroid killing assays as described in Example 11 and schematized in FIG. 20. Cells were tested for 100 hours at an E:T ratio of 10 and in the absence or presence of 10 μg/ml trastuzumab. CD16^{+/+}/mbIL-15^{+/+}iNK cells elicited greater reduction in tumor spheroid size than unedited iNK cells without or with trastuzumab (FIG. 37B). As shown in FIG. 37C, CD16^{+/+}/mbIL-15^{+/+} iNK cells showed enhanced cytotoxicity in the 3D tumor spheroid assay compared with unedited iNK cells or peripheral blood NK cells across a range of E:T ratios in the presence of 10 μg/ml trastuzumab and 5 ng/ml exogenous IL-15. The average IC50 (as measured via E:T ratio) of the CD16^{+/+}/mbIL-15^{+/+}iNK cells was significantly lower than the unedited iNK cells in the absence or presence of trastuzumab (FIG. 37C). These 3D tumor spheroid killing assay results further confirm that the CD16^{+/+}/mbIL-15^{+/+} (homozygous PLA1834-transformed) iNK cells demonstrate greater cytotoxicity of tumor cells and are more efficient at tumor cell killing than unedited (WT) iNK cells in the presence or absence of trastuzumab or in the presence of the combination of trastuzumab and exogenous IL-15.

[0653] Membrane bound IL-15 also mediated iNK cell survival for a prolonged period of time without the support of homeostatic cytokines. Starting at Day 43 post-differentiation, iNK cells were maintained in the absence of IL-2 or IL-15 for three weeks. As shown in FIG. 36J, in contrast to WT cells, the total number of iNK cells transformed with PLA1834 (heterozygote and homozygote KI cells) remained stable over the three-week assay. These data show that cells transformed with PLA1834 demonstrated superior persistence in the absence of cytokines compared to WT cells and to cells transformed with PLA1829.

### Example 15: In Vivo Assay of Bicistronic CD16 and mbIL-15 Sequences at a Suitable Essential Gene Loci

[0654] Plasmid PLA1834 was used to generate iPSC-derived NK (iNK) cells comprising mbIL-15/CD16 double knock-in (DKI), as described in Example 14. From these mbIL-15/CD16 DKI iNK cells, three homozygous (CD16^{+/+}/mbIL-15^{+/+}) clones (A2, A4, C4) were selected for testing in an in vitro lactate dehydrogenase (LDH) release assay to assess cell cytotoxicity against SK-OV-3 tumor cells as described in Example 14. An unedited (WT) iNK cell control was also tested. Cells were tested in the presence and absence of 10 μg/ml trastuzumab and at an E:T ratio of 1. As shown in FIG. 38A, mbIL-15/CD16 (CD16^{+/+}/mbIL-15^{+/+}) DKI iNK cells demonstrated significant increases in average percent cytotoxicity in the presence of trastuzumab as compared to average percentage cytotoxicity seen in the absence trastuzumab, confirming the potent in vitro tumor killing activity of these cells described in Example 14. The mbIL-15/CD16 (CD16^{+/+}/mbIL-15^{+/+}) DKI iNK cells were also examined by flow cytometry for expression of CD16. Samples of unedited (WT) or DKI iNK cells (clones A2 and A4) were pre-gated for alive hCD45+ cells and then examined for CD56 and CD16 expression. As shown in FIG. 38B, WT and DKI iNK cells were highly pure CD56+ NK cells. Moreover, both clones of the mbIL-15/CD16 (CD16^{+/+}/mbIL-15^{+/+}) DKI iNK cells had approximately 100% of cells expressing high levels of CD16, while approximately half of the WT iNK cells expressed CD16.

[0655] Following confirmation of cytotoxicity in the LDH assay and of high CD16 expression, mbIL-15/CD16 (CD16^{+/+}/mbIL-15^{+/+}) DKI iNK cells were assayed for their ability to kill tumor targets in an in vivo mouse model. FIG. 38C depicts a schematic of the assay. Mice were inoculated with 0.25×10⁶ SK-OV-3 cells engineered to express luciferase (SKOV3-luc). Following 2-6 days to allow for establishment of the tumors, mice were imaged using an in vivo imaging system (IVIS) to establish pre-treatment (day −1) tumor burden and then randomized into treatment groups. After 1 additional day (on day 0), mice were injected intraperitoneally (IP) with 2×10⁶ (2M) or 5×10⁶ (5M) mbIL-15/CD16 (CD16^{+/+}/mbIL-15^{+/+}) DKI iNK cells+2.5 mpk trastuzumab, 2.5 mpk trastuzumab alone, an isotype control, or a vehicle control. As depicted in FIG. 38C, one treatment group (mice injected with 5M mbIL-15/CD16 (CD16^{+/+}/mbIL-15^{+/+}) DKI iNK cells) received an additional dose of trastuzumab on day 35, and another treatment group (mice injected with 2M mbIL-15/CD16 (CD16^{+/+}/mbIL-15^{+/+}) DKI iNK cells) received additional doses of trastuzumab on days 21, 28, and 35. Following day 0, the mice were imaged weekly using IVIS to assess tumor burden over time. Mice were followed for up to 90 days.

[0656] The average tumor burden over time as measured by bioluminescent imaging (BLI) via IVIS is depicted in FIG. 38D, and percent survival over time is depicted in FIG. 38E. Representative bioluminescent imaging of the mice at various time points is displayed in FIG. 38F. The mouse dosed with 2×10⁶ mbIL-15/CD16 (CD16^{+/+}/mbIL-15^{+/+}) DKI iNK cells in combination with trastuzumab (2M DKI iNK+Tras) exhibited complete tumor clearance (FIGS. 38D and 38F) and prolonged survival (FIG. 38E). By contrast, the mice treated with trastuzumab alone or with the isotype control exhibited higher tumor burden and decreased survival. These data demonstrate that mbIL-15/CD16 (CD16^{+/+}/mbIL-15^{+/+}) DKI iNK cells actively kill tumor cells in an in vivo model and that treatment with both the mbIL-15/CD16 (CD16^{+/+}/mbIL-15^{+/+}) DKI iNK cells and trastuzumab results in better outcomes (e.g., prolonged survival, significantly greater tumor clearance) than dosing with trastuzumab alone.

[0657] The mouse dosed with 5×10⁶ mbIL-15/CD16 (CD16^{+/+}/mbIL-15^{+/+}) DKI iNK cells in combination with trastuzumab (5M DKI iNK+Tras) displayed a significant decrease in tumor burden by day 14, followed by an increase in tumor burden (FIGS. 38D and 38F). After sacrificing this mouse at day 90, the rebounded tumor was found to be located subcutaneously and not in the peritoneal cavity as experimentally intended. Thus, the intraperitoneally injected mbIL-15/CD16 (CD16^{+/+}/mbIL-15^{+/+}) DKI iNK cells were likely unable to access the tumor to the same extent as mbIL-15/CD16 (CD16^{+/+}/mbIL-15^{+/+}) DKI iNK cells administered to mice in other treatment groups. The presence of mbIL-15/CD16 (CD16^{+/+}/mbIL-15^{+/+}) DKI iNK cells in the peritoneal cavity of the mouse dosed with 5×10⁶ DKI iNK cells+trastuzumab was confirmed by flow cytometric analysis of the peritoneal lavage (FIG. 38G, top row). Moreover, the mbIL-15/CD16 (CD16^{+/+}/mbIL-15^{+/+}) DKI iNK cells expressed high levels of CD56 and CD16, with 100% of the cells expressing high levels of CD16 at day 90 (FIG. 38G, top right panel). Thus, the presence of the rebounded tumor in this mouse was unlikely due to a loss of the mbIL-15/CD16 (CD16^{+/+}/mbIL-15^{+/+}) DKI iNK cells. The mouse dosed with 2×10⁶ mbIL-15/CD16 (CD16^{+/+}/mbIL-15^{+/+}) DKI iNK cells+trastuzumab was sacrificed at day 118, and presence of mbIL-15/CD16 (CD16^{+/+}/mbIL-15^{+/+}) DKI iNK cells in the peritoneal cavity of the mouse was confirmed by flow cytometric analysis of the peritoneal lavage (FIG. 38G, bottom row). These cells expressed high levels of CD56 and CD16, with 92% of the cells expressing high levels of CD16 at day 118 (FIG. 38G, bottom right panel).

[0658] FIG. 38G demonstrates that knock-in of mbIL-15 prolongs the in vivo persistence of the iNK cells as compared to short-lived healthy donor-derived WT NK cells (data not shown). Further, the mbIL-15/CD16 (CD16^{+/+}/mbIL-15^{+/+}) DKI iNK cells continue to express high levels of CD16 on the cell surface due to the knock-in of CD16 (as described in Example 14), indicating that they retain the ability for ADCC mediated tumor killing in the presence of a therapeutic antibody (such as trastuzumab).

[0659] These data demonstrate that mbIL-15/CD16 (CD16^{+/+}/mbIL-15^{+/+}) DKI iNK cells are capable of persisting in vivo and maintaining high CD16 expression up to at least 118 days. This is notable, given that unedited NK cells have been reported to have limited persistence (see, e.g., Romee et al., Sci. Trans. Med. 8:357ra123357ra123 (2016)).

[0660] Further testing of the mbIL-15/CD16 (CD16^{+/+}/mbIL-15^{+/+}) DKI iNK cells in an in vivo mouse model was conducted as depicted in FIG. 39A. Mice were inoculated with 0.25×10⁶ SKOV3-luc cells. Following 2-6 davs to allow for establishment of the tumors, mice were imaged using an IVIS to establish pre-treatment (day −1) tumor burden and then randomized into treatment groups. After 1 additional day (on day 0), mice were injected intraperitoneally (IP) with 5×10⁶ unedited (WT) iNK cells, 5×10⁶ mbIL-15/CD16 (CD16^{+/+}/mbIL-15^{+/+}) DKI iNK cells (from clone A2 or A4), or no iNK cells for trastuzumab-alone or isotype control. One treatment group (“+Tras.×1”, “TRA×1”) received an IP injection of 2.5 mpk trastuzumab on day 0. Another treatment group (“+Tras.×3”, “+TRA×3”) received IP injections of 2.5 mpk trastuzumab on days 0, 7, and 14. Following day 0, the mice were imaged weekly using an IVIS to assess tumor burden over time.

[0661] The tumor burden over time as measured by bioluminescent imaging (BLI) via IVIS is depicted in FIGS. 39B, 39C, and 39E. Representative bioluminescent imaging of the mice at various time points is displayed in FIG. 39G. As seen in FIG. 39B, treatment with the unedited (WT) iNK cells or the mbIL-15/CD16 (CD16^{+/+}/mbIL-15^{+/+}) DKI iNK cells alone did not lead to tumor reduction in vivo. However, mice treated with iNK cells in combination with trastuzumab exhibited greater tumor reduction than mice treated with trastuzumab alone, whether trastuzumab was administered as a single dose (FIG. 39C) or as a multi-dose regimen (see FIG. 39E). Moreover, the reduction in tumor burden was observed for at least 144 days post-introduction of iNK cells (FIG. 39E). As shown in FIG. 39G, mbIL-15/CD16 (CD16^{+/+}/mbIL-15^{+/+}) DKI iNK cells led to significantly greater in vivo tumor reduction as compared to the unedited (WT) iNK cells measured at day 33. This was seen with two different mbIL-15/CD16 (CD16^{+/+}/mbIL-15^{+/+}) DKI clones (A2 and A4) in combination with a single dose of trastuzumab, or with clone A2 in combination with multi-dose regimen of trastuzumab. Furthermore, treatment with mbIL-15/CD16 (CD16^{+/+}/mbIL-15^{+/+}) DKI iNK cells in combination with a single dose of trastuzumab led to significantly greater in vivo tumor reduction as compared to unedited iNK cells in combination with a single dose of trastuzumab or trastuzumab alone as early as at least day 11 and as late as at least day 54 (FIG. 39H).

[0662] Mice treated with mbIL-15/CD16 (CD16^{+/+}/mbIL-15^{+/+}) DKI iNK cells in combination with trastuzumab exhibited significantly prolonged survival as compared to mice treated with trastuzumab alone (FIGS. 39D and 39F). In addition, mice treated with mbIL-15/CD16 (CD16^{+/+}/mbIL-15^{+/+}) DKI iNK cells also exhibited significantly prolonged survival as compared to mice treated with unedited (WT) iNK cells (FIG. 39F). As shown in FIG. 39I, treatment with mbIL-15/CD16 (CD16^{+/+}/mbIL-15^{+/+}) DKI iNK cells in combination with trastuzumab led to complete tumor clearance in multiple animals, with 50% (4/8) of mice being tumor-free at day 40 following treatment with DKI iNK cells in combination with multiple doses of trastuzumab. Continued monitoring revealed that at day 144, 75% (6/8) of the mice treated with mbIL-15/CD16 (CD16^{+/+}/mbIL-15^{+/+}) DKI iNK cells in combination with trastuzumab (×3) showed no detectable tumor by BLI (e.g., were tumor free). Furthermore, histological analysis targeting Her2 (tumor antigen expressed on SKOV3 cells) in the lung tissue of mice revealed that mbIL-15/CD16 (CD16^{+/+}/mbIL-15^{+/+}) DKI iNK cells resulted in reduced metastasis compared with unedited iNK cells and completely inhibited tumor metastasis in 86% of mice, compared with only 14% with unedited iNK cells (data not shown). These results confirm that mbIL-15/CD16 (CD16^{+/+}/mbIL-15^{+/+}) DKI iNK cells readily kill tumor cells in vivo and demonstrate that mbIL-15/CD16 (CD16^{+/+}/mbIL-15^{+/+}) DKI iNK cells in combination with trastuzumab produces greater in vivo tumor reduction than treatment with either trastuzumab alone or with unedited (WT) iNK cells in combination with trastuzumab.

[0663] FIG. 39J demonstrates that knock-in of mbIL-15 at an essential gene (the GAPDH locus) prolongs the in vivo persistence of the iNK cells as compared to short-lived WT NK cells. Further, the mbIL-15/CD16 (CD16^{+/+}/mbIL-15^{+/+}) DKI iNK cells continue to express high levels of CD16 on the cell surface due to the knock-in of CD16 at the GAPDH locus (as described in Example 14; bottom right plot of FIG. 39J), indicating that they retain the ability for ADCC mediated tumor killing in the presence of a therapeutic antibody (such as trastuzumab). Meanwhile, WT iNK cells were not detectable at day 144 (top left and top right plots of FIG. 39J). These data demonstrate that mbIL-15/CD16 (CD16^{+/+}/mbIL-15^{+/+}) DKI iNK cells are capable of persisting in vivo and maintaining high CD16 expression up to at least 144 days. This is notable, given that unedited NK cells have been reported to have limited persistence (see, e.g., Romee et al., Sci. Trans. Med. 8:357ra123357ra123 (2016)).

### Example 16: Computation Screening of AsCpf1 Guide RNAs Suitable for Selection by Essential-Gene Knock-In

[0664] The present example describes a method for computationally screening for AsCpf1 (AsCas12a; e.g., as represented by SEQ ID NO: 62) guide RNAs (gRNAs) suitable for methods described herein that target a number of essential housekeeping genes. The results of this screening are summarized in Table 20, these gRNAs facilitate Cas12a cleavage within the last 500 bp of the DNA coding sequences for the listed essential genes.

[0665] The essential genes in Table 20 selected for this analysis were identified in a pool of essential genes made by combining the essential genes described in Eisenberg et al., (see e.g., Eisenberg and Levanon, Human housekeeping genes, revisited. Trends Genetics, 2014) and the genes described in Yilmaz et al., (see e.g., Yilmaz et al., Defining essential genes for human pluripotent stem cells by CRISPR-Cas9 screening in haploid cells. Nature Cell Biology, 2018). In brief, essential genes described in Yilmaz et al., with CRISPR Scores less than 0, and FDR of <0.05 were combined with essential genes described in Eisenberg & Levanon to create a list of 4,582 genes in total. These genes were then sorted by their average expression level (mean normalized expression across different tissues, see e.g., RNA consensus tissue gene expression data provided by https://www.proteinatlas.org/download/rna_tissue_consensus.tsv.zip), and the 100 genes with the highest average expression levels across tissues were selected for the analysis. GAPDH was present within this group of genes. TBP, E2F4, G6PD and KIF11 were added to this group, making 104 genes in total, for further analysis.

[0666] Potential gRNA target sequences for each of the genes of interest were generated by searching for nuclease specific PAMs with suitable protospacers mapped to a representative coding region (mRNA-201). Transcripts with its name followed by “−201” were selected as the representative for each gene (e.g., GAPDH-201). Gene information (i.e., coding region) was obtained from GENCODE v.37 gene annotation GTF file. Potential gRNAs were first searched within the genomic regions of target genes in the human reference genome (hg38), and those identified gRNAs with their cut sites within 500 bp of the representative coding region's stop site were selected for further analysis. The candidate gRNAs were then aligned to the human reference genome (e.g., hg38) with BWA Aln (maximum mismatch tolerance-n 2). Guides with potential off target binding sites (i.e., aligning to multiple genomic regions; mapping quality MAPQ <30) were filtered out. The resultant gRNAs target highly and/or broadly expressed essential genes within 500 coding base pairs of a representative stop-codon and have no identical off-target binding sites annotated in the human genome. Thus, they are excellent candidate gRNAs for the selection methods described herein.

TABLE 20
AsCas12 guide RNAs

| SEQ | | Target Domain Sequence |
|---|---|---|
| ID NO | Gene | (DNA) |
| 2250 | EIF4G2 | AGGCTTTGGCTGGTTCTTTAG |
| 2260 | EIF4G2 | GCTGGTTCTTTAGTCAGCTTC |
| 2270 | EIF4G2 | GTCAGCTTCTTCCTCTGATTC |
| 2280 | EIF4G2 | TAACCAGGTTAGCCACTGATT |
| 2290 | EIF4G2 | ACAAAAGACTTACCTGGAACA |
| 2300 | EIF4G2 | CCGGAAACTCTTGGGTTATAT |
| 2310 | EIF4G2 | CAAGCCAAGAAAGCTTCTTCT |
| 2320 | EIF4G2 | CATGTCATAGAAGTGCACAAA |
| 2330 | EIF4G2 | GGAAGTTGCTGTTATAGCAGT |
| 2340 | EIF4G2 | TGCATTACTGGCTTGAAAGAT |
| 2350 | EIF4G2 | CTGCTCTAACTGTTCTTTGGA |
| 2360 | EIF4G2 | GAAGGAGCAGAGGATGAATCT |
| 2370 | EIF4G2 | ATCGCTGGGGGGGTTTACTTC |
| 2380 | EIF4G2 | CTTCACTAGAAATGTACTGTA |
| 2390 | EIF4G2 | TCTACATGAAGTTTGGGAGAG |
| 2400 | EIF4G2 | GGAGAGATGTTATCTTTAATC |
| 2410 | EIF4G2 | TATATGGTTTGAGGGGATGGA |
| 2420 | EIF4G2 | AGGGGATGGATCCAACTTTAT |
| 2430 | EIF4G2 | TAGGTGAATCAGTGGCTAACC |
| 2440 | EIF4G2 | CAAATCTTAATTTATAGGTGA |
| 2450 | EIF4G2 | ATTTACAAATCTTAATTTATA |
| 2460 | EIF4G2 | CGGGAAAAGGCAAGGCTTTGT |
| 2470 | EIF4G2 | TTGGCTTGGAAAGAAGATATA |
| 2480 | EIF4G2 | TGCACTTCTATGACATGGAAA |
| 2490 | EIF4G2 | AGGCATGTTACTTCGCTTTTT |
| 2500 | EIF4G2 | TTCATGATCACGTTGATCTAC |
| 2510 | EIF4G2 | AAGCCAGTAATGCAGAAATTT |
| 2520 | EIF4G2 | TAGTGAAGTAAACCCCCCCAG |
| 2530 | EIF4G2 | TGTCCAGCTTCTTACAGTACA |
| 2540 | EIF4G2 | TGAACATCTTAATGACTAGGT |
| 2550 | SKP1 | AAGACCTTACCTTTTTTAATA |
| 2560 | SKP1 | CAATGAACTTACCTTCCAACA |
| 2570 | SKP1 | AGCAGGGCAGAATAAAAACCA |
| 2580 | SKP1 | TTCATAATTTCAGCAGGGCAG |
| 2590 | SKP1 | CTTTGTTCATAATTTCAGCAG |
| 2600 | SKP1 | CAGGCTGCAAACTACTTAGAC |
| 2610 | SKP1 | TTGTTGTAGGTCATTCAGTGG |
| 2620 | SKP1 | TTAGATTTGGGAATGGATGAT |
| 2630 | SKP1 | TTCTGGTTTTCTTAGATTTGG |
| 2640 | SKP1 | GATGCCTTCAATTAAGTTGCA |
| 2650 | SKP1 | ATGTCCTTTTTTTTTAGATGC |
| 2660 | RPS3 | AAGCTTTATGCTGAAAAGGTG |
| 2670 | RPS3 | AAGGGCCTGCTATGGTGTGCT |
| 2680 | RPS3 | AAGGAAGCAAGGGATATCCTG |
| 2690 | RPS3 | AGCATAAAGCTTTAAAGGAAG |
| 2700 | RPS3 | CCAGACACCACAACCTCGCAG |
| 2710 | RPS3 | CCAAGCACTCTCAGCTGCTCA |
| 2720 | RPS19 | TTCTTCCATCTTTTCCCACAG |
| 2730 | RPS19 | CCACAGGTGGCAGCTGCCAAC |
| 2740 | RPS19 | TCTGACGTCCCCCATAGATCT |
| 2750 | HMGB1 | AGCCCTCTTACCTTCCACCTC |
| 2760 | HMGB1 | TGTTCATTTATTGAAGTTCTA |
| 2770 | HMGB1 | GTTCGGCCTTCTTCCTCTTCT |
| 2780 | HMGB1 | TAGACCATGTCTGCTAAAGAG |
| 2790 | HMGB1 | GAAAAATAACTAAACATGGGC |
| 2800 | RPL7 | CCCCAAATAGAACCTACCAAG |
| 2810 | RPL7 | ACTTCAGGTACCCCAATCTGA |
| 2820 | RPL7 | CTTTTTCACTTCAGGTACCCC |
| 2830 | RPL7 | TGTTTGCTTTTTCACTTCAGG |
| 2840 | RPL7 | ACCACAGTATCAATGGAGTGA |
| 2850 | RPL7 | TGGTCCGTTTTCACCACAGTA |
| 2860 | RPLP0 | AGGTCAAGGCCTTCTTGGCTG |
| 2870 | RPLP0 | ACCACTTCCCCCCTCCTTTCA |
| 2880 | G6PD | CTCACCTGCCATAAATATAGG |
| 2890 | G6PD | CAGTATGAGGGCACCTACAAG |
| 2900 | G6PD | ACCCCACTGCTGCACCAGATT |
| 2910 | G6PD | CGCCACGTAGGGGTGCCCTTC |
| 2920 | RPL4 | GCTTGTAGTGCCGCTGCTGCA |
| 2930 | RPL4 | CCGTGGTGCTCGAAGGGCTCT |
| 2940 | RPL4 | TTGCAGCACAAGCTCCGGGTG |
| 2950 | RPL4 | TGCCTAATTTGTTGCAGCACA |
| 2960 | RPL4 | TAGCAAGAAGATCCATCGCAG |
| 2970 | RPL4 | AGTCTTCCCATGCACAAGATG |
| 2980 | RPL4 | CCTTTCAGTCTTCCCATGCAC |
| 2990 | EEF1G | TCCCCAGCTGAGTCCAGATTG |
| 3000 | EEF1G | TTCCTCTTAGTACCTTTGTGT |
| 3010 | RPL31 | GATGGCTCCCGCAAAGAAGGG |
| 3020 | RPL31 | AATCGTAGGGGCTTCAAGAAG |
| 3030 | RPL31 | TTAGGAATGTGCCATACCGAA |
| 3040 | RPL31 | CAGATCTACAGACAGTCAATG |
| 3050 | RPL31 | GCACCTTATTCCTTTGGCCCA |
| 3060 | RPL31 | TGGGATGGAGAACTTACTTTT |
| 3070 | RPL31 | ATCTGACGATCAGCGATTAGT |
| 3080 | ITM2B | ACTGTCTTTTTCATATTTTAG |
| 3090 | ITM2B | ATATTTTAGGACCCAGATGAT |
| 3100 | ITM2B | GGACCCAGATGATGTGGTACC |
| 3110 | ITM2B | GACTAGCATTTATGCTTGCAG |
| 3120 | ITM2B | TGCTTGCAGGTGTTATTCTAG |
| 3130 | ITM2B | TGAATGTAGGCTGGAACCTAT |
| 3140 | ITM2B | CCTCAGTCCTATCTGATTCAT |
| 3150 | ITM2B | TTTATTTATCGACTGTGTCAT |
| 3160 | ITM2B | TTTATCGACTGTGTCATGACA |
| 3170 | ITM2B | TCGACTGTGTCATGACAAGGA |
| 3180 | ITM2B | CCTCTCCAACAGGTATTCAGA |
| 3190 | ITM2B | GCAATTCGGCATTTTGAAAAC |
| 3200 | ITM2B | AAAACAAATTTGCCGTGGAAA |
| 3210 | ITM2B | CCGTGGAAACTTTAATTTGTT |
| 3220 | ITM2B | GCCAACTGGTACCACATCATC |
| 3230 | ITM2B | TACAAGTATGCTCCTCCTAGA |
| 3240 | ITM2B | CACTTACTTGAAGTGCAAAAT |
| 3250 | ITM2B | AATGCGATCAGTAATAACCAT |
| 3260 | ITM2B | CTTGTCATGACACAGTCGATA |
| 3270 | ITM2B | TAAGTTTCCTTGTCATGACAC |
| 3280 | ITM2B | TCTGCGTTGCAGTTTGTAAGT |
| 3290 | ITM2B | ATAGTTTCTCTGCGTTGCAGT |
| 3300 | ITM2B | AAAAGTATTACCTTTAATAGT |
| 3310 | ITM2B | ATATTTAAAAAGTATTACCTT |
| 3320 | ITM2B | AAAATGCCGAATTGCGAAACA |
| 3330 | ITM2B | TTTTCAAAATGCCGAATTGCG |
| 3340 | ITM2B | CACGGCAAATTTGTTTTCAAA |
| 3350 | ITM2B | TTGACTGTTCAAGAACAAATT |
| 3360 | RPL23A | CTTTTCTCCCAGCTCCTGCCC |
| 3370 | RPL23A | TCCCAGCTCCTGCCCCTCCTA |
| 3380 | RPL23A | CCTCTCCCAGGCTTGACCACT |
| 3390 | RPL23A | TTTTTCAGATTGGGATCATCT |
| 3400 | RPL23A | TAGGAAGGAAACTTACTTTGT |
| 3410 | RPL27A | GTCTGGGCTGCCAACATGGTA |
| 3420 | RPL27A | TATTCCTGCAGGCAAGCACCG |
| 3430 | RPL27A | TCTGTTCTTCTAGGGCTACTA |
| 3440 | PCBP2 | CCCTCTGACTCTCTCCCAGTC |
| 3450 | PCBP2 | CTCCTTTTGTAGGCCTATACC |
| 3460 | PCBP2 | TAGGCCTATACCATTCAAGGA |
| 3470 | PCBP2 | CTCCTTGCAGTTGACCAAGCT |
| 3480 | PCBP2 | ACTTGTATCTTAACAGGCATT |
| 3490 | PCBP2 | GCAGGTTTGGATGCATCTGCT |
| 3500 | PCBP2 | TTTCTCCCTTAAGTTGATTGG |
| 3510 | PCBP2 | TCCCTTAAGTTGATTGGCTGC |
| 3520 | PCBP2 | TGTGTTACAGGCTTTCCTCGG |
| 3530 | PCBP2 | AGCATGAGCCTGAGGGCTTAC |
| 3540 | PCBP2 | TTACCTGACCACCTGCAAAGA |
| 3550 | PCBP2 | ATCATTACCCCAATAGCCTTT |
| 3560 | HSPA8 | TCTTCCTCAGACTGCTGAGAA |
| 3570 | HSPA8 | CTAGGCCGTTTGAGCAAGGAA |
| 3580 | HSPA8 | TTTCCTAGGCCGTTTGAGCAA |
| 3590 | HNRNPK | ATCAGCACTGAAACCAACCTG |
| 3600 | HNRNPK | AGTTGGCTGGATCTATTATTG |
| 3610 | HNRNPK | AAAAATCTTTTCAGTTGGCTG |
| 3620 | HNRNPK | AATCAGATTATTCCTATGCAG |
| 3630 | HNRNPK | TGTTTTTAGGGTGGCTCCGGA |
| 3640 | HNRNPK | TTTCTGTTTTTAGGGTGGCTC |
| 3650 | HNRNPK | TCTCTAACAGGTTGGTTTCAG |
| 3660 | RPL5 | TCTCTTACTATAGATTGCTTA |
| 3670 | RPL5 | CATTGGTTTCTTGAATAGCTT |
| 3680 | RPL5 | TTGAATAGCTTCTCAATAGGT |
| 3690 | UBL5 | TGTAGCTCCAGCTAGGATGAT |
| 3700 | UBL5 | CCTTAACTGCTCTGCGCCCAG |
| 3710 | UBL5 | TTAGGTACACGATTTTTAAGG |
| 3720 | UBL5 | CTTCAGATGAAATCCACGATG |
| 3730 | CST3 | GACAAGGTCATTGTGCCCTGC |
| 3740 | CST3 | AGATGTGGCTGGTCATGGAAG |
| 3750 | CST3 | TTGTACTCGCCGACGGCAAAG |
| 3760 | CST3 | CAGATCTACGCTGTGCCTTGG |
| 3770 | CST3 | ACAGAAAGCATTCTGCTCTTT |
| 3780 | CST3 | CTTTCACAGAAAGCATTCTGC |
| 3790 | CST3 | ACATGTGTAGATCGTAGCTGG |
| 3800 | CST3 | CCGTCGGCGAGTACAACAAAG |
| 3810 | RPS29 | TCACCAAGAGCGAGAACCCTG |
| 3820 | RPS29 | TTACAGTCGTGTCTGTTCAAA |
| 3830 | RPS10 | TACTGTACATGCTTCCTTTTT |
| 3840 | RPS10 | CAAATGACATTATCTGAGAGC |
| 3850 | RPS10 | CTCACGTGGCACAGCACTCCG |
| 3860 | RPS10 | TGTGGGAACCATACCTTTAGG |
| 3870 | RPS10 | TAAAAAGGAAGCATGTACAGT |
| 3880 | RPS10 | TCCTATGGCAGGTCCTCATAG |
| 3890 | RPS10 | TAGCTGGTGCCGACAAGAAAG |
| 3900 | RPS10 | ACTTTCTAGCTGGTGCCGACA |
| 3910 | RPS10 | CATAGGTCTGGAGGGTGAGCG |
| 3920 | RPS10 | ATTTACATAGGTCTGGAGGGT |
| 3930 | RPS10 | TGCCTTACAGTCTCTCAAGTC |
| 3940 | RPL6 | TTACCAGTCACAAGTAATAAG |
| 3950 | RPL6 | GAAATATGAGATTACGGAGCA |
| 3960 | RPL6 | TTTAGAAATATGAGATTACGG |
| 3970 | RPL6 | TCTTTATTTAGAAATATGAGA |
| 3980 | RPL6 | ATTTTCTCTTTATTTAGAAAT |
| 3990 | RPL6 | CCCCTTAGGACCTCTGGTCCT |
| 4000 | RPL6 | ACTTACAGAGGGTGGTTTTCC |
| 4010 | RPL6 | TTTTTAACTTACAGAGGGTGG |
| 4020 | RPLP2 | TGTAGGTATTGGCAAGCTTGC |
| 4030 | ARF1 | ACACTGGCTGCCCGGCAGGCC |
| 4040 | RPL15 | TGTGTAGGTTACGTTATATAT |
| 4050 | RPL15 | CTATTCTAGGAGCGAGCTGGA |
| 4060 | RPL15 | CCTCTGCAACGGACTGAAGGC |
| 4070 | FAU | CTGGCCGGTCACCTCGAAGGT |
| 4080 | FAU | CCTGTAGGCTCATGTAGCCTC |
| 4090 | FAU | CTCAGTCGCCAATATGCAGCT |
| 4100 | FAU | TTTACTCAGTCGCCAATATGC |
| 4110 | RPL36 | CCCCCTAGCGTCTGACCAAAC |
| 4120 | RPL36 | CCCCGTACGAGCGGCGCGCCA |
| 4130 | NACA | CTAGTATACCTCTTCCTCTTC |
| 4140 | NACA | CTCACCTTGGCTTCCCCAAAA |
| 4150 | NACA | AAATCTTACCTTCCGTGCCTT |
| 4160 | NACA | TCTGTTACAGGAATTAACAAT |
| 4170 | NACA | CCTCTCATCTCTCAGGTCGAT |
| 4180 | NACA | TACCCTGTAGATCGAAGATTT |
| 4190 | NACA | GGCTATGTCCAAACTGGGTCT |
| 4200 | NACA | TCTTCTTTAGGCTATGTCCAA |
| 4210 | NACA | TCTTCTTAGCTGGCGGCAGCA |
| 4220 | PRDX1 | GACATCAGGCTTGATGGTATC |
| 4230 | PRDX1 | CCATGCTAGATGACAGAAGTG |
| 4240 | PRDX1 | TTAAATTCTTCTGCCCTATCA |
| 4250 | PRDX1 | TCTTGCAGTGTGCCCAGCTGG |
| 4260 | PRDX1 | TCATTGATGATAAGGGTATTC |
| 4270 | PRDX1 | CCAGGGGCCTTTTTATCATTG |
| 4280 | PRDX1 | ATCTCTTTTCCCAGGGGCCTT |
| 4290 | PRDX1 | CTTTCATCTCTTTTCCCAGGG |
| 4300 | PRDX1 | GTATCAGACCCGAAGCGCACC |
| 4310 | PRDX1 | CCATAGGGTCAATACACCTAA |
| 4320 | PRDX1 | CCTTTTGCCATAGGGTCAATA |
| 4330 | PRDX1 | AGTGATAGGGCAGAAGAATTT |
| 4340 | PRDX1 | CCCTCTTGACTTCACCTTTGT |
| 4350 | PRDX1 | CCCCCAGGAAAATATGTTGTG |
| 4360 | ALDOA | CCTTCTCGGTCACATACTGGC |
| 4370 | NCL | GCCCAGTCCAAGGTAACTTTA |
| 4380 | NCL | TTTCCATCAATTTCACCGTCT |
| 4390 | NCL | CATCAATTTCACCGTCTTCCA |
| 4400 | NCL | ACCGTCTTCCATGGCCTCCTT |
| 4410 | NCL | GCATCCTCCTCACTGTTGAAG |
| 4420 | NCL | GAGGACCCAGTTTCCCGGTCA |
| 4430 | NCL | CCGGTCAGTAACTATCCTTGC |
| 4440 | NCL | ATGTCTCTTCAGTGGTATCCT |
| 4450 | NCL | ACAAACAGAGTTTTGGATGGC |
| 4460 | NCL | GTGGCAGAGGCCGGGGAGGCT |
| 4470 | NCL | GAGGACGAGGTGGTGGTAGAG |
| 4480 | NCL | TAGACTTCAACAGTGAGGAGG |
| 4490 | NCL | GTTTTGTAGACTTCAACAGTG |
| 4500 | NCL | GTGTTCTAGGTTTGGTTTTGT |
| 4510 | NCL | ATTTGGTGTTCTAGGTTTGGT |
| 4520 | NCL | ACGGCTCCGTTCGGGCAAGGA |
| 4530 | NCL | TCAAAGGCCTGTCTGAGGATA |
| 4540 | NCL | CTTCCCAGAGCCATCCAAAAC |
| 4550 | BTF3 | TAGATGAAAGAAACAATCATG |
| 4560 | BTF3 | CTCTTCTCCCTGACTTTAGGG |
| 4570 | BTF3 | GGGAACTGCTCGCAGAAAGAA |
| 4580 | BTF3 | TTTTCTTAATAGGTGAATATG |
| 4590 | BTF3 | TTAATAGGTGAATATGTTTAC |
| 4600 | BTF3 | CATTTTCCTTTCATAGCTGTG |
| 4610 | BTF3 | CTTTCATAGCTGTGGATGGAA |
| 4620 | BTF3 | ATAGCTGTGGATGGAAAAGCA |
| 4630 | BTF3 | TACTCTTTTCCTTTTCCTAGA |
| 4640 | BTF3 | CTTTTCCTAGATCTTGTGGAG |
| 4650 | BTF3 | CTAGATCTTGTGGAGAATTTT |
| 4660 | BTF3 | ATACTTGCCTCTTCAATACCA |
| 4670 | E2F4 | GGGGCTATCATTGTAGTGAGT |
| 4680 | E2F4 | AGCCCATCAAGGCAGACCCCA |
| 4690 | E2F4 | AGTTTTGGAACTCCCCAAAGA |
| 4700 | E2F4 | GAACTCCCCAAAGAGCTGTCA |
| 4710 | E2F4 | CCCCTCTGCTTCGTCTTTCTC |
| 4720 | E2F4 | TCCACCCCCGGGAGACCACGA |
| 4730 | E2F4 | ATGTGCCTGTTCTCAACCTCT |
| 4740 | E2F4 | TGACAGCTCTTTGGGGAGTTC |
| 4750 | KIF11 | ACTAAGCTTAATTGCTTTCTG |
| 4760 | KIF11 | TGGAACAGGATCTGAAACTGG |
| 4770 | KIF11 | TACCCATCAACACTGGTAAGA |
| 4780 | KIF11 | TTCTTTTAGGATGTGGATGTA |
| 4790 | KIF11 | GGATGTGGATGTAGAAGAGGC |
| 4800 | KIF11 | CCGCCTTAAATCCACAGCATA |
| 4810 | KIF11 | ATTAAGTTCTAGATTTTGTGC |
| 4820 | KIF11 | TGGTTTCATTAAGTTCTAGAT |
| 4830 | KIF11 | AGATCCTGTTCCAGAAAGCAA |
| 4840 | KIF11 | AAGTACCTGTTGGGATATCCA |
| 4850 | KIF11 | TCTTTTAAAGTACCTGTTGGG |
| 4860 | KIF11 | AGCTGATCAAGGAGATGTTCA |
| 4870 | KIF11 | CTTTTCAGCTGATCAAGGAGA |
| 4880 | KIF11 | GCATCATTAACAGCTCAGGCT |
| 4890 | KIF11 | TGAACAGTTTAGCATCATTAA |
| 4900 | KIF11 | TTGTTTTCTGAACAGTTTAGC |
| 4910 | KIF11 | CCGGAATTGTCTCTTCTTTGT |
| 4920 | KIF11 | AATTTACCGGAATTGTCTCTT |
| 4930 | KIF11 | TCTTTTCCATGTGATTTTTTA |
| 4940 | KIF11 | TTTGTCTTTTCCATGTGATTT |
| 4950 | KIF11 | GACCTCTCCAGTGTGTTAATG |
| 4960 | KIF11 | TTCCACTTTAGACCTCTCCAG |
| 4970 | KIF11 | TAACCAAGTGCTCTGTAGTTT |
| 4980 | RPL13 | TCTTCTAGGTCTATAAGAAGG |
| 4990 | RPL13 | AGTAAGTGTTCACTTACGTTC |
| 5000 | PFDN5 | CCTTAATTCTTGCTTCTCAGA |
| 5010 | PFDN5 | AGCTGAGCAATGGACGTGGAC |
| 5020 | PTMA | AAGGACTTAAAGGAGAAGAAG |
| 5030 | PTMA | TGTCGAGGAGAATGAGGAAAA |
| 5040 | PTMA | ATTCTCTCCAGGTGAGGAAGA |
| 5050 | PTMA | TCTGCTTAGGATGACGATGTC |
| 5060 | RPL11 | GCATCCGGAGAAATGAAAAGA |
| 5070 | RPL11 | TCCACAGGTGCGGGAGTATGA |
| 5080 | RPL11 | AGCATCGCAGACAAGAAGCGC |
| 5090 | RPL11 | AGTATGATGGGATCATCCTTC |
| 5100 | RPL11 | CGGATGCGAAGTTCCCGCATG |
| 5110 | RPL11 | TCCGGATGCCAAAGGATCTGA |
| 5120 | RPL11 | ATTTCTCCGGATGCCAAAGGA |
| 5130 | RPL11 | GACCCTTCTCCAAGATTTCTT |
| 5140 | RPL11 | TTAACTCATACTCCCGCACCT |
| 5150 | RPL11 | CCTTCTGCTGGAACCAGCGCA |
| 5160 | COX7C | TCTTTTTTTCCAACAGAATTT |
| 5170 | COX7C | CAACAGAATTTGCCATTTTCA |
| 5180 | RPL8 | TTGAGGCCCTCAGCACTAGTT |
| 5190 | RPL8 | CGGCCAGCAGGGGCATCTCTG |
| 5200 | RPL8 | TGGGTTACTTACATTCATGGC |
| 5210 | RPL8 | TCTGCCTGCAGCCTGTGGAGC |
| 5220 | RPL10 | TTCTCCCTACCTAGCCCTGGA |
| 5230 | RPL10 | CATTGCTCCTTAGATCCACAT |
| 5240 | RPL32 | CCTCCCCAAAAGGAAGAGTTC |
| 5250 | TBP | CTGCGGTAATCATGAGGATAA |
| 5260 | TBP | AGTTCTGGGAAAATGGTGTGC |
| 5270 | TBP | CTTTCCCTAGTGAAGAACAGT |
| 5280 | TBP | CCTAGTGAAGAACAGTCCAGA |
| 5290 | TBP | CAGCTAAGTTCTTGGACTTCA |
| 5300 | TBP | CTATAAGGTTAGAAGGCCTTG |
| 5310 | TBP | CAATTTTCCTTCTAGTTATGA |
| 5320 | TBP | CTTCTAGTTATGAGCCAGAGT |
| 5330 | TBP | CTGGTTTAATCTACAGAATGA |
| 5340 | TBP | ATCTACAGAATGATCAAACCC |
| 5350 | TBP | TTTCTGGAAAAGTTGTATTAA |
| 5360 | TBP | TGGAAAAGTTGTATTAACAGG |
| 5370 | TBP | GGTCAAGTTTACAACCAAGAT |
| 5380 | TBP | GGGCACGAAGTGCAATGGTCT |
| 5390 | TBP | CCAGAACTGAAAATCAGTGCC |
| 5400 | TBP | TTACGGCTACCTCTTGGCTCC |
| 5410 | TBP | TTGCTGCCAGTCTGGACTGTT |
| 5420 | TBP | AGACTTACCTACTAAATTGTT |
| 5430 | TBP | ATCATTCTGTAGATTAAACCA |
| 5440 | TBP | CAGAAACAAAAATAAGGAGAA |
| 5450 | TBP | AAATGCTTCATAAATTTCTGC |
| 5460 | CD63 | CTCAGCCAGCCCCCAATCTTC |
| 5470 | CD63 | TCCCAATCTGTGTAGTTAGCA |
| 5480 | CD63 | GGGTAATTCTCCATCTGCTGC |
| 5490 | CD63 | GGAATTGTCTTTGCCTGCTGC |
| 5500 | CD63 | CTTCTAGGTTTTGGGAATTGT |
| 5510 | CD63 | TGCCTGCCACCTTCAGGGCTG |
| 5520 | CD63 | AACGAGAAGGCGATCCATAAG |
| 5530 | CD63 | AGTGCTGTGGGGCTGCTAACT |
| 5540 | CD63 | TTCCCTCCCCCAGTTTAAGTG |
| 5550 | CD63 | ATAACAACTTCCGGCAGCAGA |
| 5560 | CD63 | TGTCTCTTATCATGTTGGTGG |
| 5570 | CD63 | CCATCTTTCTGTCTCTTATCA |
| 5580 | CD63 | CTCCTGCAGTTTGCCATCTTT |
| 5590 | CD63 | TGGGCTGCTGCGGGGCCTGCA |
| 5600 | RPS24 | TGTTTTCAGAACGACACCGTA |
| 5610 | RPS24 | AGAACGACACCGTAACTATCC |
| 5620 | RPS24 | GGTCATTGATGTCCTTCACCC |
| 5630 | RPS24 | TCATTCAGCATGGCCTGTATG |
| 5640 | RPS24 | CCTCTTCTTCTGGATTACAGA |
| 5650 | RPS24 | TAGTGCGGATAGTTACGGTGT |
| 5660 | RPS24 | CTTAATGAACTATACCTTTTT |
| 5670 | RPS23 | GGGCTGTGCCCAAATGAGCTT |
| 5680 | RPS23 | TTCCAGGAAAATGATGAAGTT |
| 5690 | RPS23 | TACCCAATGACGGTTGCTTGA |
| 5700 | RPS23 | AGAGGAGTTGAAGCCAAACAG |
| 5710 | RPS23 | TATTTCAGAGGAGTTGAAGCC |
| 5720 | RPS23 | GGCAAGTGTCGTGGACTTCGT |
| 5730 | RPS23 | ATTTTTAGGCAAGTGTCGTGG |
| 5740 | EEF2 | TCCAGGAAGTTGTCCAGGGCA |
| 5750 | EEF2 | AGGCCCTTGCGCTTGCGGGTC |
| 5760 | EEF2 | ACCACTGGCAGATCCTGCCCG |
| 5770 | EEF2 | TGGTCAAGGCCTATCTGCCCG |
| 5780 | EEF2 | AACAGGAAGCGGGGCCACGTG |
| 5790 | EEF2 | CCTTCTGGCAGTGTCCAGAGC |
| 5800 | EEF2 | TTTCCCTTCTGGCAGTGTCCA |
| 5810 | CALR | CTTCTCCCTTCTGCAGGGTGA |
| 5820 | CALR | GCGTGCTGGGCCTGGACCTCT |
| 5830 | CALR | ACAACTTCCTCATCACCAACG |
| 5840 | CALR | GCAACGAGACGTGGGGCGTAA |
| 5850 | CALR | TGGGTGGATCCAAGTGCCCTT |
| 5860 | CALR | CTCCAAGTCTCACCTGCCAGA |
| 5870 | CALR | TTACGCCCCACGTCTCGTTGC |
| 5880 | CALR | TCCTTCATTTGTTTCTCTGCT |
| 5890 | CALR | TTGTCTTCTTCCTCCTCCTTA |
| 5900 | CALR | TCCTCATCATCCTCCTTGTCC |
| 5910 | RPL36AL | TATGCCCAGGGAAGGAGGCGC |
| 5920 | SRP14 | AGGCTTATTCAAACCTCCTTA |
| 5930 | SRP14 | AGGTGAGCTCCAAGGAAGTGA |
| 5940 | SRP14 | CTTCTTTTTCAGGTGAGCTCC |
| 5950 | SRP14 | CTTCAGATGACGGTCGAACCA |
| 5960 | SRP14 | CAGAAGTGCCGGACGTCGGGC |
| 5970 | SRP14 | CAGTTCCTGACGGAGCTGACC |
| 5980 | GABARAP | TTTCGGATCTTCTCGCCCTCA |
| 5990 | GABARAP | GGATCTTCTCGCCCTCAGAGC |
| 6000 | GABARAP | TCTACATTGCCTACAGTGACG |
| 6010 | GABARAP | ATCCCAGGAACACCATGAAGA |
| 6020 | GABARAP | TGCTTTCATCCCAGGAACACC |
| 6030 | GABARAP | TCAACAATGTCATTCCACCCA |
| 6040 | GABARAP | TTTGTCAACAATGTCATTCCA |
| 6050 | GABARAP | CAGTTGGTCAGTTCTACTTCT |
| 6060 | GABARAP | TTGCATCTTGTATCTTTTGCA |
| 6070 | GABARAP | TCAGGTGATAGTAGAAAAGGC |
| 6080 | GABARAP | ATCTCTTTATCAGGTGATAGT |
| 6090 | RPSA | ATAATCTGCCACTCTTGGCAG |
| 6100 | RPSA | TAACCCAGATTGAAAAAGAAG |
| 6110 | RPSA | GTATTCTCTTAACAGAAGACT |
| 6120 | RPSA | GAGAAGCTTACCTCTTCAGGA |
| 6130 | SET | AATTATTTATTACAGTATTTT |
| 6140 | SET | TTACAGTATTTTGATGAAAAT |
| 6150 | SET | GGATTTGACGAAACGTTCGAG |
| 6160 | SET | ACGAAACGTTCGAGTCAAACG |
| 6170 | SET | AGGTTCCCGATATGGATGATG |
| 6180 | SET | TTTCAGGAGGATGAAGGAGAA |
| 6190 | SET | AGGAGGATGAAGGAGAAGATG |
| 6200 | SET | TTTTACCTCTCCTTCCTCCCC |
| 6210 | SET | GCCAAATTTTCTTTTACCTCT |
| 6220 | GAPDH | CAGACCACAGTCCATGCCATC |
| 6230 | GAPDH | ATCTTCTAGGTATGACAACGA |
| 6240 | RPLP1 | TTTGTTGTAGGAGGATAAGAT |
| 6250 | RPLP1 | TTGTAGGAGGATAAGATCAAT |
| 6260 | RPLP1 | TAGCTGAGGAGAAGAAAGTGG |
| 6270 | RPLP1 | CCACCATCACCTTACCTTTGC |
| 6280 | RPLP1 | CTACCTGGAGCAGCAGCAGTG |
| 6290 | CFL1 | CTCTTAAGGGGCGCAGACTCG |
| 6300 | CFL1 | TAGGGATCAAGCATGAATTGC |
| 6310 | CFL1 | TTCTTTATAGGGATCAAGCAT |
| 6320 | CFL1 | TGTCCAGGGCCCCCGAGTCTG |
| 6330 | RPS15 | CTCTTGGTCTCCCGCAGCCCG |
| 6340 | TPT1 | CATTATTTATTTTAACCCACT |
| 6350 | TPT1 | TTTTAACCCACTTCCTTGTAC |
| 6360 | TPT1 | ACCCACTTCCTTGTACTTACA |
| 6370 | TPT1 | CCTGGTAGTTTTTGAAATTAG |
| 6380 | TPT1 | GAAATGGAAAAATGTGTAAGT |
| 6390 | TPT1 | CTTCCCAAGTTCTTTATTGGT |
| 6400 | TPT1 | TTTGCTTCCCAAGTTCTTTAT |
| 6410 | TPT1 | GAATCAAAGGGAAACTTGAAG |
| 6420 | TPT1 | TTAATGCAGATGGTCAGTAGG |
| 6430 | RPL23 | CTACCTTTCATCTCGCCTTTA |
| 6440 | RPL23 | TTGTTCACTATGACTCCTGCA |
| 6450 | RPL23 | CTCACCCTTTTTTCTGAGCTC |
| 6460 | RPL23 | ATGCAGGTTCTGCCATTACAG |
| 6470 | RPL23 | TTTTTTTAATGCAGGTTCTGC |
| 6480 | RPL23 | TTCTCTCAGTACATCCAGCAG |
| 6490 | RPL34 | ACTTTCTAGGTCCCGAACCCC |
| 6500 | RPL34 | TAGGTCCCGAACCCCTGGTAA |
| 6510 | RPL34 | TTATGCAGGTTCGTGCTGTAA |
| 6520 | RPL34 | GTATTTTCCTTTCTAGGATCA |
| 6530 | RPL34 | CTTTCTAGGATCAAGCGTGCT |
| 6540 | RPL34 | TAGGATCAAGCGTGCTTTCCT |
| 6550 | RPL34 | AGAAATACTTACAGCCTAGTT |
| 6560 | RPL34 | ACTTACCTGTCACGAACACAT |
| 6570 | RPL34 | AGCATTTAACTTACCTGTCAC |
| 6580 | COX4I1 | TCTTTCAGAATGTTGGCTACC |
| 6590 | COX4I1 | AGAATGTTGGCTACCAGGGTA |
| 6600 | COX4I1 | CACCTCTGTGTGTGTACGAGC |
| 6610 | COX4I1 | TTCAATATGTTTTTCAGAAAG |
| 6620 | COX411 | AGAAAGTGTTGTGAAGAGCGA |
| 6630 | COX411 | GCTCCCAGCTTATATGGATCG |
| 6640 | COX411 | CTGAGATGAACAGGGGCTCGA |
| 6650 | COX4I1 | ACCGCGCTCGTTATCATGTGG |
| 6660 | COX4I1 | ACAAAGAGTGGGTGGCCAAGC |
| 6670 | COX4I1 | TCAAAGCTTTGCGGGAGGGGG |
| 6680 | COX4I1 | GTAGTCCCACTTGGAGGCTAA |
| 6690 | RPL27 | TCCTTGCTCTCTGCAGAAATG |
| 6700 | RPL27 | GAACATTGATGATGGCACCTC |
| 6710 | RPL27 | TCCCCAGGTACTCTGTGGATA |
| 6720 | RPL27 | CCTTCTAGATACAAGACAGGC |
| 6730 | RPL27 | CGTCCGGAGTAGCGTCCAGCC |
| 6740 | RPL27 | TCTTTGATCTCTTGGCGATCT |
| 6750 | RPL27 | ACAAAAGATTTTATCTTTGAT |
| 6760 | EDF1 | GAGGCTTTGTGTTCATTTCGC |
| 6770 | EDF1 | TGTTCATTTCGCCCTAGGCCC |
| 6780 | EDF1 | GCCCTAGGCCCCTTCTCGATG |
| 6790 | EDF1 | CAATGTCCTTTCCCCGGAGCT |
| 6800 | EDF1 | CCAAGCACCTGGTTATTGGGT |
| 6810 | EDF1 | TTGGAAGTCTCCACATCTTCT |
| 6820 | EDF1 | GCCTGGGCGGCCGTAGGGCCC |
| 6830 | EDF1 | AGGCCTCAAGCTCCGGGGAAA |
| 6840 | EDF1 | GAAAATCAATGAGAAGCCACA |
| 6850 | EDF1 | CCTCACACCGACTCCAGGGGC |
| 6860 | EDF1 | TAGGCTATCTTAGCGGCACAG |
| 6870 | EDF1 | TAATTTTCTAGGCTATCTTAG |
| 6880 | TMEM59 | AAAGAAAAATGCTTAAATTTC |
| 6890 | TMEM59 | AGAATGAGCAAGATTCACTTT |
| 6900 | TMEM59 | TAGGTAGAGGCCCTGCTTCTT |
| 6910 | TMEM59 | GATCTAACAACCACAAGAGAA |
| 6920 | TMEM59 | GCTTTTGTTCATTCATAAACT |
| 6930 | TMEM59 | TTCATTCATAAACTCCAAGTC |
| 6940 | TMEM59 | CCTCAGAGGGAACATACTGCT |
| 6950 | TMEM59 | TCCATCTTCAAGAAAATTCCT |
| 6960 | TMEM59 | CTTAGAGATGATTCTCTCAAA |
| 6970 | TMEM59 | TAGGCTCCTGCTCCAAATGTG |
| 6980 | TMEM59 | CGTCATCGGCTTGAAGATAAA |
| 6990 | TMEM59 | TGAATGAACAAAAGCTAAACA |
| 7000 | TMEM59 | CAGAAGCTGAGTATCTATGGT |
| 7010 | TMEM59 | TTTTGCAGAAGCTGAGTATCT |
| 7020 | TMEM59 | TTGTGCAACTGTTGCTACAGC |
| 7030 | TMEM59 | GATTTGTTGTGCAACTGTTGC |
| 7040 | TMEM59 | ACTACAACTCTTGTCCTCTCG |
| 7050 | TMEM59 | CAGTAACTCTGGGTGGATTTT |
| 7060 | TMEM59 | TTGAAGATGGAGAAAGTGATG |
| 7070 | TMEM59 | AGCAGATCTGCAAATGAGAAA |
| 7080 | TMEM59 | AGAGAATCATCTCTAAGCAAA |
| 7090 | TMEM59 | GAGCAGGAGCCTACAAATTTG |
| 7100 | TMEM59 | GTCTAAGCCAGAAATCCAGTA |
| 7110 | TMEM59 | ATTATTATTTTAGTCTAAGCC |
| 7120 | TMEM59 | TCTTCAAGCCGATGACGGAAA |
| 7130 | DYNLL1 | TCTTTTCCAGGAATTTGACAA |
| 7140 | DYNLL1 | CAGGAATTTGACAAGAAGTAC |
| 7150 | DYNLL1 | ATGTGTCACATAACTACCGAA |
| 7160 | NME2 | TTTCTTAGGAACATCATTCAT |
| 7170 | NME2 | TTAGGAACATCATTCATGGCA |
| 7180 | TMBIM6 | GCTGATGGCAACACCTCATAG |
| 7190 | TMBIM6 | TGTTTTCTAGGAGTTGGCCTG |
| 7200 | TMBIM6 | TAGGAGTTGGCCTGGGCCCTG |
| 7210 | TMBIM6 | TATTGCTGTCAACCCCAGGTA |
| 7220 | TMBIM6 | TAACAGCATCCTTCCCACTGC |
| 7230 | TMBIM6 | ATGGGCACGGCAATGATCTTT |
| 7240 | TMBIM6 | CCTGCTTCACCCTCAGTGCAC |
| 7250 | TMBIM6 | CTGTGTCTTATAGGTATCTTG |
| 7260 | TMBIM6 | TCTTCCCTGGGGAATGTTTTC |
| 7270 | TMBIM6 | GATCCATTTGGCTTTTCCAGG |
| 7280 | TMBIM6 | TTAGGCAAACCTGTATGTGGG |
| 7290 | TMBIM6 | ATACTCAACTCATTATTGAAA |
| 7300 | TMBIM6 | AGGCACTGCATTGATCTCTTC |
| 7310 | TMBIM6 | ATTACTGTCTTCAGAAAACTC |
| 7320 | TMBIM6 | TCCATTTCTAGGATAAGAAGA |
| 7330 | TMBIM6 | TAGGATAAGAAGAAAGAGAAG |
| 7340 | TMBIM6 | ATGGCTATGAGGTGTTGCCAT |
| 7350 | TMBIM6 | TGTTCAGTTTCATGGCTATGA |
| 7360 | TMBIM6 | CCAGTTCACACTTACCTCCCA |
| 7370 | TMBIM6 | AATAATGAGTTGAGTATCAAA |
| 7380 | TMBIM6 | TGAAGACAGTAATGAAATCTA |
| 7390 | TMBIM6 | ATTCATGGCCAGGATCATCAT |
| 7400 | TMBIM6 | GGTTGTAGGCTAACTAACCTT |
| 7410 | RPS7 | TTTAGGAAATTGAAGTTGGTG |
| 7420 | RPS7 | GGAAATTGAAGTTGGTGGTGG |
| 7430 | RPS7 | CCTTACAGAGGAGAATTCTGC |
| 7440 | RPS7 | AACTATTCTTTTAGCCGTACT |
| 7450 | RPS7 | GCCGTACTCTGACAGCTGTGC |
| 7460 | RPS7 | TTTTCTTGTAGGTTGAAACTT |
| 7470 | RPS7 | TTGTAGGTTGAAACTTTTTCT |
| 7480 | RPS7 | TGAAACTACTAAAATACTCAC |
| 7490 | ACTB | CTTCCCAGGGCGTGATGGTGG |
| 7500 | NPM1 | ATTTGTAGTGATGATGATGAT |
| 7510 | NPM1 | TAATTGCAGTCTATACGAGAT |
| 7520 | NPM1 | GAAATTCATTTCTTTTTCAGG |
| 7530 | NPM1 | TTTTTCAGGGACAAGAATCCT |
| 7540 | NPM1 | AGGGACAAGAATCCTTCAAGA |
| 7550 | NPM1 | TCTTAATAGGGTGGTTCTCTT |
| 7560 | NPM1 | CAGGCTATTCAAGATCTCTGG |
| 7570 | NPM1 | TAAAATCATACTTACTCTTCA |
| 7580 | NPM1 | CTCACTTTTTCTATACTTGCT |
| 7590 | RPS6 | TTTTTCTTGGTACGCTGCTTC |
| 7600 | RPS6 | GGGCCCAGGCGGCGAGGCACT |
| 7610 | RPS6 | GGAGGCTAAGGAGAAGCGCCA |
| 7620 | RPS6 | TTTAGGAGGCTAAGGAGAAGC |
| 7630 | RPS6 | TTTTGTTTAGGAGGCTAAGGA |
| 7640 | RPS6 | GGTAAGAAACCTAGGACCAAA |
| 7650 | RPS6 | AATTTTTAGGTAAGAAACCTA |
| 7660 | RPS6 | TTCTAAGGAGAGAAGGATATT |
| 7670 | RPL12 | CTTAAAGGAACCATTAAAGAG |
| 7680 | RPL12 | TTTACTTAAAGGAACCATTAA |
| 7690 | RPL12 | CTCTTCTGCAGTTAAACACAG |
| 7700 | RPL12 | CTGTTTCCTCTTCTGCAGTTA |
| 7710 | RPL12 | TAGTCTCCAAAAAAAGTTGGT |
| 7720 | RPL12 | TTTCTAGTCTCCAAAAAAAGT |
| 7730 | RPL12 | CCCCAGTATACCTGAGGTGCA |
| 7740 | CAPNS1 | AACCTGTTACCCACAGACCCT |
| 7750 | CAPNS1 | GCATTGACACATGTCGCAGCA |
| 7760 | CAPNS1 | AGGAATTCAAGTACTTGTGGA |
| 7770 | CAPNS1 | CAGTAGTGAACTCCCAGGTGC |
| 7780 | CAPNS1 | ATGTTGTTCCACAAGTACTTG |
| 7790 | CAPNS1 | TACACACCTGCCACCTTTTGA |
| 7800 | CAPNS1 | AGAGGTTTCTACACACCTGCC |
| 7810 | CAPNS1 | ATCTGAGTAGCGTCGGATGAT |
| 7820 | CAPNS1 | TCAAGAGATTTGAAGGCACCT |
| 7830 | CAPNS1 | TCCAGTGCCATCTTTGTCAAG |
| 7840 | RPL3 | CAGGGTGGCTTTGTCCACTAT |
| 7850 | RPS13 | TTTATTAGCTTACCTTTCTGT |
| 7860 | RPS13 | TTAGCTTACCTTTCTGTTCCT |
| 7870 | RPS13 | AGTGAATCATCTACAGCCTCT |
| 7880 | RPS13 | TTTTTCAGTGAATCATCTACA |
| 7890 | RPS13 | CCCTTTTTTCTTTTTCAGTGA |
| 7900 | RPS13 | AGGTGTAATCCTGAGAGATTC |
| 7910 | RPS13 | TATTCCATAACAGTGGTTGAA |
| 7920 | RPS21 | TCCACAGCTCCGCTAGCAATC |
| 7930 | RPS21 | TGACCCTTCTTCTCTTTCTAG |
| 7940 | RPS21 | TAGGTTGACAAGGTCACAGGC |
| 7950 | RPS21 | TTAAGGGTGAGTCAGATGATT |
| 7960 | RPS21 | CCCTGGTTCTAGGAACTTTTG |
| 7970 | RPS21 | AGACGATGCCATCGGCCTTGG |
| 7980 | SERF2 | ATTTTCTTTCCTTAGGCGGTA |
| 7990 | SERF2 | TTTCCTTAGGCGGTAACCAGC |
| 8000 | SERF2 | CTTAGGCGGTAACCAGCGTGA |
| 8010 | SERF2 | TGCTGCCGCCCGCAAGCAGAG |
| 8020 | SERF2 | ATATTCTTCTGGCGGGCGAGC |
| 8030 | SERF2 | CCTTAACCGAGTCGCTCTGCT |
| 8040 | SERF2 | CCTCCCCTCCCTGGGGCTACC |
| 8050 | RPL7A | TTTCCCCTCCTGCCTTTTAGG |
| 8060 | RPL7A | CCCTCCTGCCTTTTAGGGAAG |
| 8070 | RPL7A | GGGAAGACAAAGGCGCTTTGG |
| 8080 | RPL7A | TCTTTTCAGATCCGCCGTCAC |
| 8090 | RPL7A | AGATCCGCCGTCACTGGGGTG |
| 8100 | RPL7A | GGGCCAGGCTGTGTACTTACG |
| 8110 | RPL7A | GTGTAAAGCTGCCTCTTACCT |
| 8120 | HNRNPA2B1 | TAAATTACCTCCACCATATGG |
| 8130 | HNRNPA2B1 | CACTCTTCATTGGACCGTAGT |
| 8140 | HNRNPA2B1 | CAAAATCATTGTAATTTCCAC |
| 8150 | HNRNPA2B1 | TTACCTCCTCCATAGTTGTCA |
| 8160 | HNRNPA2B1 | CACCGCCACCACGTGAATCCC |
| 8170 | HNRNPA2B1 | GTGGTAGCAGGAACATGGGGG |
| 8180 | HNRNPA2B1 | GAAATTATAACCAGCAACCTT |
| 8190 | HNRNPA2B1 | ATAGGAAATTATGGAAGTGGA |
| 8200 | HNRNPA2B1 | GAGGTAGCCCCGGTTATGGAG |
| 8210 | HNRNPA2B1 | TAATAGGTGGCAATTTTGGAG |
| 8220 | HNRNPA2B1 | GGGATGGCTATAATGGGTATG |
| 8230 | HNRNPA2B1 | GCCCCTAACAGATGGATATGG |
| 8240 | HNRNPA2B1 | GGACCAGGACCAGGAAGTAAC |
| 8250 | HNRNPA2B1 | GGGATTCACGTGGTGGCGGTG |
| 8260 | HNRNPA2B1 | GCTTTGGGGATTCACGTGGTG |
| 8270 | HNRNPA2B1 | TTGTAGGCAACTTTGGCTTTG |
| 8280 | HNRNPA2B1 | TCTAGACAAGAAATGCAGGAA |
| 8290 | RPL13A | TCTAACAGAAAAAGCGGATGG |
| 8300 | RPL13A | GCATAGCTCACCTTGTCGTAG |
| 8310 | ENO1 | AGCAGGAGGCAGTTGCAGGAC |
| 8320 | ENO1 | TCCTTCCCAAGAATTGAAGAG |
| 8330 | ENO1 | CCTTTCTCCTTCCCAAGAATT |
| 8340 | ENO1 | TCCTAGATCAAGACTGGTGCC |
| 8350 | ENO1 | TTTTCTCCTAGATCAAGACTG |
| 8360 | ENO1 | CTTAGTGGTGTCTATCGAAGA |
| 8370 | PPIA | CTATATGTTGACAGGGTGGTG |
| 8380 | PPIA | AAGGTTGGATGGCAAGCATGT |
| 8390 | CD81 | CCTGTGAGGTGGCCGCCGGCA |
| 8400 | CD81 | ACCACCTCAGTGCTCAAGAAC |
| 8410 | CD81 | TGTCCCTCGGGCAGCAACATC |
| 8420 | RPL35 | TTGACAATGCGCCCCTCAGGC |
| 8430 | RPL35 | TAGCCGAGTCGTCCGGAAATC |
| 8440 | DAD1 | TTCTGTGGGTTGATCTGTATT |
| 8450 | DAD1 | CCAGCACCATCCTGCACCTTG |
| 8460 | DAD1 | TCTTTGCCAGCACCATCCTGC |
| 8470 | DAD1 | CTGATTTTCTCTTTGCCAGCA |
| 8480 | DAD1 | CAAGGCATCTCCCCAGAGCGA |
| 8490 | DAD1 | CCTGAGAATACAGATCAACCC |
| 8500 | DAD1 | CTTCTTGTGCAGTTTGCCTGA |
| 8510 | DAD1 | TGTTTTGCTTCTTGTGCAGTT |
| 8520 | DAD1 | TCTCGGGCTTCATCTCTTGTG |
| 8530 | DAD1 | GCGGTTCTTAGAAGAGTACTT |
| 8540 | UBA52 | TGAAGACCCTCACTGGCAAAA |
| 8550 | UBA52 | CCAGTGAGGGTCTTCACAAAG |
| 8560 | UBA52 | TGGGCAAGCTGGCGGAGAGAA |
| 8570 | UBA52 | ACCTTCTTCTTGGGACGCAGG |
| 8580 | RPL30 | TAGGTGAAAAGGTTTACTTTT |
| 8590 | RPL30 | TGATTTAAAAAGCATACCTGG |
| 8600 | RPL30 | AAAAGCATACCTGGATCAATG |
| 8610 | RPL30 | GGTGACTCTGACATCATTAGA |
| 8620 | RPL30 | TTTTTTAGGTGACTCTGACAT |
| 8630 | RPL30 | TTTTTATTTTTTAGGTGACTC |
| 8640 | RPL30 | GTTCCCAAAGGAAATCTGAAA |
| 8650 | RPL30 | CCCATTTTGGTTCCCAAAGGA |
| 8660 | RPL30 | TAGAAAAAGTCGCTGGAGTCG |
| 8670 | RPL30 | CTTTGTAGAAAAAGTCGCTGG |
| 8680 | RPL30 | ATGTTTGCTTTGTAGAAAAAG |
| 8690 | RNASEK | CGCCTGCCGCCCCCGGATGGG |
| 8700 | RNASEK | TCCCACCGCTTTCCGAGCCCG |
| 8710 | RNASEK | CGAGCCCGCTTGCACCTCGGC |
| 8720 | RNASEK | TGGCGTCGCTCCTGTGCTGTG |
| 8730 | RPL38 | TGTTGCAGCCTCGGAAAATTG |
| 8740 | RPL38 | TCTCTTTCCCTCTAGGTTTGG |
| 8750 | RPL38 | CCTCTAGGTTTGGCAGTGAAG |
| 8760 | RPL38 | GTCGGGCTGTGAGCAGGAAGT |
| 8770 | MYL12B | TTCTTTCTATTGTCTTCCAGG |
| 8780 | MYL12B | TATTGTCTTCCAGGCACCATT |
| 8790 | MYL12B | GCTAAAGTTCTTTCAGTCATC |
| 8800 | PFN1 | CCCATCAGCAGGACTAGCGCT |
| 8810 | PFN1 | CTCCTCCTCCAGCGCTAGTCC |
| 8820 | PFN1 | TCTTTCCTCCTCCTCCAGCGC |
| 8830 | PFN1 | GCATGGATCTTCGTACCAAGA |
| 8840 | RPS11 | TCCTCATAATCTGTAGACTGA |
| 8850 | RPS11 | TCTTTCCTATCCTTTCAGGCT |
| 8860 | RPS11 | CTATCCTTTCAGGCTATTGAG |
| 8870 | RPS11 | AGGCTATTGAGGGCACCTACA |
| 8880 | RPS11 | TTCTGAGGTTCCCCGCACCTC |

### Example 17: Computation Screening of Guide RNAs for Selection by Essential-Gene Knock-In

[0667] The present example describes a method for computationally screening for gRNAs more likely to be suitable for use in targeting essential genes using the selection methods herein that are relevant for different RNA-guided nucleases and variants thereof (e.g., variants of Cas12a, such as Mad7), so long as the RNA-guided nucleases exhibit high cutting efficiency. Cas12b, Cas12e, Cas-Phi, Mad7, and SpyCas9 gRNAs targeting essential genes described preceding examples (GAPDH, TBP, E2F4, G6PD, and KIF11) were selected for this analysis, but a similar process could be applied to identify gRNAs for these RNA-guided nucleases in other essential genes as well. The results of this screening are summarized in Tables 21-25, these gRNAs facilitate DNA cleavage within the last 500 bp of the coding sequences of the listed essential genes.

[0668] Potential target sequences for each of the essential genes in this analysis (GAPDH, TBP, E2F4, G6PD, and KIF11) were generated by searching for nuclease specific PAMs (ATTN, TTCN, TTN, TTN, and NGG for Cas12b, Cas12e, CasΦ, Mad7, and SpyCas9 respectively) with suitable protospacers mapped to a representative coding region (mRNA-201). Transcripts with its name followed by “−201” were selected as the representative for each gene (e.g., GAPDH-201). Gene information (i.e., coding region) was obtained from GENCODE v.37 gene annotation GTF file. Potential gRNAs were first searched within the genomic regions of target genes in the human reference genome (hg38), and those identified gRNAs with their cut sites within 500 bp of the representative coding region stop site were selected for further analysis. The candidate gRNAs were then aligned to the human reference genome (e.g., hg38) with BWA Aln (maximum mismatch tolerance-n 2). Guides with potential off target binding sites (i.e., aligning to multiple genomic regions; mapping quality MAPQ<30) were filtered out. The resultant gRNAs target essential genes within 500 coding base pairs of a representative stop-codon and have no identical off-target binding sites annotated in the human genome. Thus, gRNAs in Tables 21-25, corresponding to SEQ ID NOs: 8890-18850, represent excellent candidate gRNAs for applying the selection methods described herein to GAPDH, TBP, E2F4, G6PD, and KIF11.

TABLE 21
Cas12b guide RNAs

| SEQ | | |
|---|---|---|
| ID NO | Gene | Target Domain Sequence (DNA) |
| 8890 | GAPDH | CCCAGCTCTCATACCATGAGTCC |
| 8900 | TBP | TATCCACAGTGAATCTTGGTTGT |
| 8910 | TBP | CACTTCGTGCCCGAAACGCCGAA |
| 8920 | TBP | TCTCTGACCATTGTAGCGGTTTG |
| 8930 | TBP | TAGCGGTTTGCTGCGGTAATCAT |
| 8940 | TBP | TCAGTTCTGGGAAAATGGTGTGC |
| 8950 | TBP | AGAATATGGTGGGGAGCTGTGAT |
| 8960 | TBP | TCCTTCTAGTTATGAGCCAGAGT |
| 8970 | TBP | CCTGGTTTAATCTACAGAATGAT |
| 8980 | TBP | TTCTCCTTATTTTTGTTTCTGGA |
| 8990 | TBP | TTGTTTCTGGAAAAGTTGTATTA |
| 9000 | TBP | ATGAAGCATTTGAAAACATCTAC |
| 9010 | TBP | TAAAGGGATTCAGGAAGACGACG |
| 9020 | TBP | GGCGTTTCGGGCACGAAGTGCAA |
| 9030 | TBP | TATTCGGCGTTTCGGGCACGAAG |
| 9040 | TBP | AAATAGATCTAACCTTGGGATTA |
| 9050 | TBP | TCCCAGAACTGAAAATCAGTGCC |
| 9060 | TBP | CTTACGGCTACCTCTTGGCTCCT |
| 9070 | TBP | TCTTGCTGCCAGTCTGGACTGTT |
| 9080 | TBP | TGAATCTTGAAGTCCAAGAACTT |
| 9090 | TBP | TTGGTGGGTGAGCACAAGGCCTT |
| 9100 | TBP | CAGACTTACCTACTAAATTGTTG |
| 9110 | TBP | AACCAGGAAATAACTCTGGCTCA |
| 9120 | TBP | TGTAGATTAAACCAGGAAATAAC |
| 9130 | TBP | TGGGTTTGATCATTCTGTAGATT |
| 9140 | TBP | CTGCTCTGACTTTAGCACCTAAG |
| 9150 | TBP | CGTCGTCTTCCTGAATCCCTTTA |
| 9160 | E2F4 | TAGTGAGTGGCGGCCCTGGGACT |
| 9170 | E2F4 | CCAGAGTGCATGAGCTCGGAGCT |
| 9180 | E2F4 | TATCTACAACCTGGACGAGAGTG |
| 9190 | E2F4 | CCTGGACTTCTGCACTGCCAGGG |
| 9200 | E2F4 | CTGACAGCTCTTTGGGGAGTTCC |
| 9210 | G6PD | AGCTGGAGAAGCCCAAGCCCATC |
| 9220 | G6PD | TCACCCCACTGCTGCACCAGATT |
| 9230 | KIF11 | ATGAAGATAAATTGATAGCACAA |
| 9240 | KIF11 | ATAGCACAAAATCTAGAACTTAA |
| 9250 | KIF11 | GTTTGACTAAGCTTAATTGCTTT |
| 9260 | KIF11 | CTTTCTGGAACAGGATCTGAAAC |
| 9270 | KIF11 | ATACCCATCAACACTGGTAAGAA |
| 9280 | KIF11 | TTCATCAATTGGCGGGGTTCCAT |
| 9290 | KIF11 | GCGGGGTTCCATTTTTCCAGGTA |
| 9300 | KIF11 | TCCCGCCTTAAATCCACAGCATA |
| 9310 | KIF11 | ACACACTGGAGAGGTCTAAAGTG |
| 9320 | KIF11 | CCTCTGCGAGCCCAGATCAACCT |
| 9330 | KIF11 | AGTTCTAGATTTTGTGCTATCAA |
| 9340 | KIF11 | TTATGGTTTCATTAAGTTCTAGA |
| 9350 | KIF11 | AGCTTAGTCAAACCAATTTTTAT |
| 9360 | KIF11 | CTCTTTTAAAGTACCTGTTGGGA |
| 9370 | KIF11 | TATTTCTCTTTTAAAGTACCTGT |
| 9380 | KIF11 | ACAGCTCAGGCTGTTTCCTTTTC |
| 9390 | KIF11 | TCTCTTCTTTGTTGTTTTCTGAA |
| 9400 | KIF11 | ACCGGAATTGTCTCTTCTTTGTT |
| 9410 | KIF11 | ATGAACAATCCACACCAGCATCT |
| 9420 | KIF11 | AAGGTTGATCTGGGCTCGCAGAG |
| 9430 | KIF11 | CCAACCCCCAAGTGAATTAAAGG |

TABLE 22
Cas12e guide RNAs

| SEQ | | Target Domain |
|---|---|---|
| ID NO | Gene | Sequence (DNA) |
| 9440 | GAPDH | TCTTCTAGGTATGACAACGAA |
| 9450 | GAPDH | CCAGCTCTCATACCATGAGTC |
| 9460 | TBP | TGCCCGAAACGCCGAATATAA |
| 9470 | TBP | CTCTGACCATTGTAGCGGTTT |
| 9480 | TBP | GTTCTGGGAAAATGGTGTGCA |
| 9490 | TBP | GGGAAAATGGTGTGCACAGGA |
| 9500 | TBP | TTTCCCTAGTGAAGAACAGTC |
| 9510 | TBP | CTAGTGAAGAACAGTCCAGAC |
| 9520 | TBP | AGCTAAGTTCTTGGACTTCAA |
| 9530 | TBP | TGGACTTCAAGATTCAGAATA |
| 9540 | TBP | AGATTCAGAATATGGTGGGGA |
| 9550 | TBP | GAATATGGTGGGGAGCTGTGA |
| 9560 | TBP | TATAAGGTTAGAAGGCCTTGT |
| 9570 | TBP | TTCTAGTTATGAGCCAGAGTT |
| 9580 | TBP | AGTTATGAGCCAGAGTTATTT |
| 9590 | TBP | TGGTTTAATCTACAGAATGAT |
| 9600 | TBP | CCTTATTTTTGTTTCTGGAAA |
| 9610 | TBP | GGAAAAGTTGTATTAACAGGT |
| 9620 | TBP | TAGGTGCTAAAGTCAGAGCAG |
| 9630 | TBP | AAAGGGATTCAGGAAGACGAC |
| 9640 | TBP | GGCACGAAGTGCAATGGTCTT |
| 9650 | TBP | GCGTTTCGGGCACGAAGTGCA |
| 9660 | TBP | TGGCTCTCTTATCCTCATGAT |
| 9670 | TBP | CAGAACTGAAAATCAGTGCCG |
| 9680 | TBP | TACGGCTACCTCTTGGCTCCT |
| 9690 | TBP | TGCTGCCAGTCTGGACTGTTC |
| 9700 | TBP | GTACAACTCTAGCATATTTTC |
| 9710 | TBP | GAATCTTGAAGTCCAAGAACT |
| 9720 | TBP | CATCACAGCTCCCCACCATAT |
| 9730 | TBP | AACCTTATAGGAAACTTCACA |
| 9740 | TBP | GACTTACCTACTAAATTGTTG |
| 9750 | TBP | GTAGATTAAACCAGGAAATAA |
| 9760 | TBP | GGGTTTGATCATTCTGTAGAT |
| 9770 | TBP | AGAAACAAAAATAAGGAGAAC |
| 9780 | TBP | TGTTACAACTTACCTGTTAAT |
| 9790 | TBP | GCTCTGACTTTAGCACCTAAG |
| 9800 | TBP | TAAATTTCTGCTCTGACTTTA |
| 9810 | TBP | AATGCTTCATAAATTTCTGCT |
| 9820 | TBP | TGAATCCCTTTAGAATAGGGT |
| 9830 | E2F4 | CTCCCACTGGGCCCAACAACA |
| 9840 | E2F4 | GCCCTGCTGGACAGCAGCAGC |
| 9850 | E2F4 | TCCGGACCCAACCCTTCTACC |
| 9860 | E2F4 | ACCTCCTTTGAGCCCATCAAG |
| 9870 | E2F4 | TGTTTTTCAGTTTTGGAACTC |
| 9880 | E2F4 | GTTTTGGAACTCCCCAAAGAG |
| 9890 | E2F4 | CAGAGTGCATGAGCTCGGAGC |
| 9900 | E2F4 | TCTTTCTCCACCCCCGGGAGA |
| 9910 | E2F4 | CCACCCCCGGGAGACCACGAT |
| 9920 | E2F4 | GCACTGCCAGGGACAGCAGTG |
| 9930 | E2F4 | CTGGACTTCTGCACTGCCAGG |
| 9940 | E2F4 | GACAGCTCTTTGGGGAGTTCC |
| 9950 | E2F4 | GAGGACATCAACTCCTCCAGC |
| 9960 | E2F4 | AGGGCCACCCACCTTCTGAGG |
| 9970 | E2F4 | CTCTCGTCCAGGTTGTAGATA |
| 9980 | G6PD | CCCACTTGTAGGTGCCCTCAT |
| 9990 | G6PD | TCAGCTCGTCTGCCTCCGTGG |
| 10000 | G6PD | TCACCTGCCATAAATATAGGG |
| 10010 | G6PD | CCAGCTCAATCTGGTGCAGCA |
| 10020 | G6PD | CTGTAGGGCACCTTGTATCTG |
| 10030 | G6PD | TGGTCATCATCTTGGTGTACA |
| 10040 | G6PD | GGGCCTTGCCGCAGCGCAGGA |
| 10050 | G6PD | AGTATGAGGGCACCTACAAGT |
| 10060 | G6PD | CCCCACTGCTGCACCAGATTG |
| 10070 | G6PD | GCGGGAGCCAGATGCACTTCG |
| 10080 | G6PD | ACCCCGAGGAGTCGGAGCTGG |
| 10090 | G6PD | TCAACCCCGAGGAGTCGGAGC |
| 10100 | G6PD | ACCAGCAGTGCAAGCGCAACG |
| 10110 | G6PD | ATGATGTGGCCGGCGACATCT |
| 10120 | G6PD | TCCTGCGCTGCGGCAAGGCCC |
| 10130 | G6PD | GCCACGTAGGGGTGCCCTTCA |
| 10140 | KIF11 | GGAACAGGATCTGAAACTGGA |
| 10150 | KIF11 | GAAAACAACAAAGAAGAGACA |
| 10160 | KIF11 | TCTTTTAGGATGTGGATGTAG |
| 10170 | KIF11 | TTTAGGATGTGGATGTAGAAG |
| 10180 | KIF11 | GGGGCAGTATACTGAAGAACC |
| 10190 | KIF11 | TCAATTGGCGGGGTTCCATTT |
| 10200 | KIF11 | CGCCTTAAATCCACAGCATAA |
| 10210 | KIF11 | AGATTTTGTGCTATCAATTTA |
| 10220 | KIF11 | TTAAGTTCTAGATTTTGTGCT |
| 10230 | KIF11 | AGAAAGCAATTAAGCTTAGTC |
| 10240 | KIF11 | GATCCTGTTCCAGAAAGCAAT |
| 10250 | KIF11 | CTTTTAAAGTACCTGTTGGGA |
| 10260 | KIF11 | ATTTCTCTTTTAAAGTACCTG |
| 10270 | KIF11 | TCTGTGGTGTCGTACCTTTAA |
| 10280 | KIF11 | TACCAGTGTTGATGGGTATAA |
| 10290 | KIF11 | GTTCTTACCAGTGTTGATGGG |
| 10300 | KIF11 | CGTGGTTCAGTTCTTACCAGT |
| 10310 | KIF11 | GCTGATCAAGGAGATGTTCAC |
| 10320 | KIF11 | TTTTCAGCTGATCAAGGAGAT |
| 10330 | KIF11 | GAACAGTTTAGCATCATTAAC |
| 10340 | KIF11 | TTGTTGTTTTCTGAACAGTTT |
| 10350 | KIF11 | GTATACTGCCCCAGAACTGCC |
| 10360 | KIF11 | TCAGTATACTGCCCCAGAACT |
| 10370 | KIF11 | ATGTGATTTTTTATGCTGTGG |
| 10380 | KIF11 | TTGTCTTTTCCATGTGATTTT |
| 10390 | KIF11 | ACTTTAGACCTCTCCAGTGTG |
| 10400 | KIF11 | TCCACTTTAGACCTCTCCAGT |
| — | — | — |

TABLE 23
Cas-Phi guide RNAs

| SEQ | | |
|---|---|---|
| ID NO | Gene | Target Domain Sequence (DNA) |
| 10410 | GAPDH | TGCAGACCACAGTCCATGCCA |
| 10420 | GAPDH | GCAGACCACAGTCCATGCCAT |
| 10430 | GAPDH | CAGACCACAGTCCATGCCATC |
| 10440 | GAPDH | TCATCTTCTAGGTATGACAAC |
| 10450 | GAPDH | CATCTTCTAGGTATGACAACG |
| 10460 | GAPDH | ATCTTCTAGGTATGACAACGA |
| 10470 | GAPDH | TAGGTATGACAACGAATTTGG |
| 10480 | GAPDH | CCCAGCTCTCATACCATGAGT |
| 10490 | TBP | TATCCACAGTGAATCTTGGTT |
| 10500 | TBP | GTTGTAAACTTGACCTAAAGA |
| 10510 | TBP | TAAACTTGACCTAAAGACCAT |
| 10520 | TBP | ACCTAAAGACCATTGCACTTC |
| 10530 | TBP | CACTTCGTGCCCGAAACGCCG |
| 10540 | TBP | GTGCCCGAAACGCCGAATATA |
| 10550 | TBP | TCTCTGACCATTGTAGCGGTT |
| 10560 | TBP | TAGCGGTTTGCTGCGGTAATC |
| 10570 | TBP | GCTGCGGTAATCATGAGGATA |
| 10580 | TBP | CTGCGGTAATCATGAGGATAA |
| 10590 | TBP | TCAGTTCTGGGAAAATGGTGT |
| 10600 | TBP | CAGTTCTGGGAAAATGGTGTG |
| 10610 | TBP | AGTTCTGGGAAAATGGTGTGC |
| 10620 | TBP | TGGGAAAATGGTGTGCACAGG |
| 10630 | TBP | TTTCCTTTCCCTAGTGAAGAA |
| 10640 | TBP | TTCCTTTCCCTAGTGAAGAAC |
| 10650 | TBP | TCCTTTCCCTAGTGAAGAACA |
| 10660 | TBP | CCTTTCCCTAGTGAAGAACAG |
| 10670 | TBP | CTTTCCCTAGTGAAGAACAGT |
| 10680 | TBP | CCCTAGTGAAGAACAGTCCAG |
| 10690 | TBP | CCTAGTGAAGAACAGTCCAGA |
| 10700 | TBP | TACAGAAGTTGGGTTTTCCAG |
| 10710 | TBP | GGTTTTCCAGCTAAGTTCTTG |
| 10720 | TBP | TCCAGCTAAGTTCTTGGACTT |
| 10730 | TBP | CCAGCTAAGTTCTTGGACTTC |
| 10740 | TBP | CAGCTAAGTTCTTGGACTTCA |
| 10750 | TBP | TTGGACTTCAAGATTCAGAAT |
| 10760 | TBP | GACTTCAAGATTCAGAATATG |
| 10770 | TBP | AAGATTCAGAATATGGTGGGG |
| 10780 | TBP | AGAATATGGTGGGGAGCTGTG |
| 10790 | TBP | CCTATAAGGTTAGAAGGCCTT |
| 10800 | TBP | CTATAAGGTTAGAAGGCCTTG |
| 10810 | TBP | TGCTCACCCACCAACAATTTA |
| 10820 | TBP | TTGCAATTTTCCTTCTAGTTA |
| 10830 | TBP | TGCAATTTTCCTTCTAGTTAT |
| 10840 | TBP | GCAATTTTCCTTCTAGTTATG |
| 10850 | TBP | CAATTTTCCTTCTAGTTATGA |
| 10860 | TBP | TCCTTCTAGTTATGAGCCAGA |
| 10870 | TBP | CCTTCTAGTTATGAGCCAGAG |
| 10880 | TBP | CTTCTAGTTATGAGCCAGAGT |
| 10890 | TBP | TAGTTATGAGCCAGAGTTATT |
| 10900 | TBP | TGAGCCAGAGTTATTTCCTGG |
| 10910 | TBP | CCTGGTTTAATCTACAGAATG |
| 10920 | TBP | CTGGTTTAATCTACAGAATGA |
| 10930 | TBP | AATCTACAGAATGATCAAACC |
| 10940 | TBP | ATCTACAGAATGATCAAACCC |
| 10950 | TBP | TTCTCCTTATTTTTGTTTCTG |
| 10960 | TBP | TCCTTATTTTTGTTTCTGGAA |
| 10970 | TBP | TTTTTGTTTCTGGAAAAGTTG |
| 10980 | TBP | TTGTTTCTGGAAAAGTTGTAT |
| 10990 | TBP | TGTTTCTGGAAAAGTTGTATT |
| 11000 | TBP | GTTTCTGGAAAAGTTGTATTA |
| 11010 | TBP | TTTCTGGAAAAGTTGTATTAA |
| 11020 | TBP | CTGGAAAAGTTGTATTAACAG |
| 11030 | TBP | TGGAAAAGTTGTATTAACAGG |
| 11040 | TBP | TCTTCTTAGGTGCTAAAGTCA |
| 11050 | TBP | TTAGGTGCTAAAGTCAGAGCA |
| 11060 | TBP | GGTGCTAAAGTCAGAGCAGAA |
| 11070 | TBP | TAAAGGGATTCAGGAAGACGA |
| 11080 | TBP | GGTCAAGTTTACAACCAAGAT |
| 11090 | TBP | AGGTCAAGTTTACAACCAAGA |
| 11100 | TBP | GGGCACGAAGTGCAATGGTCT |
| 11110 | TBP | CGGGCACGAAGTGCAATGGTC |
| 11120 | TBP | GGCGTTTCGGGCACGAAGTGC |
| 11130 | TBP | TATTCGGCGTTTCGGGCACGA |
| 11140 | TBP | GGATTATATTCGGCGTTTCGG |
| 11150 | TBP | AAATAGATCTAACCTTGGGAT |
| 11160 | TBP | TCCTCATGATTACCGCAGCAA |
| 11170 | TBP | GTGGCTCTCTTATCCTCATGA |
| 11180 | TBP | CCAGAACTGAAAATCAGTGCC |
| 11190 | TBP | CCCAGAACTGAAAATCAGTGC |
| 11200 | TBP | TCCCAGAACTGAAAATCAGTG |
| 11210 | TBP | GCTCCTGTGCACACCATTTTC |
| 11220 | TBP | CGGCTACCTCTTGGCTCCTGT |
| 11230 | TBP | TTACGGCTACCTCTTGGCTCC |
| 11240 | TBP | CTTACGGCTACCTCTTGGCTC |
| 11250 | TBP | CTGCCAGTCTGGACTGTTCTT |
| 11260 | TBP | TTGCTGCCAGTCTGGACTGTT |
| 11270 | TBP | CTTGCTGCCAGTCTGGACTGT |
| 11280 | TBP | TCTTGCTGCCAGTCTGGACTG |
| 11290 | TBP | TGTACAACTCTAGCATATTTT |
| 11300 | TBP | GCTGGAAAACCCAACTTCTGT |
| 11310 | TBP | AAGTCCAAGAACTTAGCTGGA |
| 11320 | TBP | TGAATCTTGAAGTCCAAGAAC |
| 11330 | TBP | ACATCACAGCTCCCCACCATA |
| 11340 | TBP | TAACCTTATAGGAAACTTCAC |
| 11350 | TBP | GTGGGTGAGCACAAGGCCTTC |
| 11360 | TBP | TTGGTGGGTGAGCACAAGGCC |
| 11370 | TBP | CCTACTAAATTGTTGGTGGGT |
| 11380 | TBP | AGACTTACCTACTAAATTGTT |
| 11390 | TBP | CAGACTTACCTACTAAATTGT |
| 11400 | TBP | AACCAGGAAATAACTCTGGCT |
| 11410 | TBP | TGTAGATTAAACCAGGAAATA |
| 11420 | TBP | ATCATTCTGTAGATTAAACCA |
| 11430 | TBP | GATCATTCTGTAGATTAAACC |
| 11440 | TBP | TGGGTTTGATCATTCTGTAGA |
| 11450 | TBP | CAGAAACAAAAATAAGGAGAA |
| 11460 | TBP | CCAGAAACAAAAATAAGGAGA |
| 11470 | TBP | TCCAGAAACAAAAATAAGGAG |
| 11480 | TBP | ATACAACTTTTCCAGAAACAA |
| 11490 | TBP | CCTGTTAATACAACTTTTCCA |
| 11500 | TBP | CAACTTACCTGTTAATACAAC |
| 11510 | TBP | CTGTTACAACTTACCTGTTAA |
| 11520 | TBP | TGCTCTGACTTTAGCACCTAA |
| 11530 | TBP | CTGCTCTGACTTTAGCACCTA |
| 11540 | TBP | ATAAATTTCTGCTCTGACTTT |
| 11550 | TBP | AAATGCTTCATAAATTTCTGC |
| 11560 | TBP | CAAATGCTTCATAAATTTCTG |
| 11570 | TBP | TCAAATGCTTCATAAATTTCT |
| 11580 | TBP | CTGAATCCCTTTAGAATAGGG |
| 11590 | TBP | CGTCGTCTTCCTGAATCCCTT |
| 11600 | E2F4 | GGGGGCTATCATTGTAGTGAG |
| 11610 | E2F4 | GGGGCTATCATTGTAGTGAGT |
| 11620 | E2F4 | TAGTGAGTGGCGGCCCTGGGA |
| 11630 | E2F4 | ACTCCCACTGGGCCCAACAAC |
| 11640 | E2F4 | TGCCCTGCTGGACAGCAGCAG |
| 11650 | E2F4 | GTCCGGACCCAACCCTTCTAC |
| 11660 | E2F4 | TACCTCCTTTGAGCCCATCAA |
| 11670 | E2F4 | GAGCCCATCAAGGCAGACCCC |
| 11680 | E2F4 | AGCCCATCAAGGCAGACCCCA |
| 11690 | E2F4 | CTTGTTTTTCAGTTTTGGAAC |
| 11700 | E2F4 | TTTTTCAGTTTTGGAACTCCC |
| 11710 | E2F4 | TTCAGTTTTGGAACTCCCCAA |
| 11720 | E2F4 | TCAGTTTTGGAACTCCCCAAA |
| 11730 | E2F4 | CAGTTTTGGAACTCCCCAAAG |
| 11740 | E2F4 | AGTTTTGGAACTCCCCAAAGA |
| 11750 | E2F4 | TGGAACTCCCCAAAGAGCTGT |
| 11760 | E2F4 | GGAACTCCCCAAAGAGCTGTC |
| 11770 | E2F4 | CCAGAGTGCATGAGCTCGGAG |
| 11780 | E2F4 | GCCCCTCTGCTTCGTCTTTCT |
| 11790 | E2F4 | CCCCTCTGCTTCGTCTTTCTC |
| 11800 | E2F4 | GTCTTTCTCCACCCCCGGGAG |
| 11810 | E2F4 | CTCCACCCCCGGGAGACCACG |
| 11820 | E2F4 | TCCACCCCCGGGAGACCACGA |
| 11830 | E2F4 | TATCTACAACCTGGACGAGAG |
| 11840 | E2F4 | GATGTGCCTGTTCTCAACCTC |
| 11850 | E2F4 | ATGTGCCTGTTCTCAACCTCT |
| 11860 | E2F4 | TGCACTGCCAGGGACAGCAGT |
| 11870 | E2F4 | CCTGGACTTCTGCACTGCCAG |
| 11880 | E2F4 | CTATCAGTCCCAGGGCCGCCA |
| 11890 | E2F4 | GGCCCAGTGGGAGTGAACTGA |
| 11900 | E2F4 | TTGGGCCCAGTGGGAGTGAAC |
| 11910 | E2F4 | GGTCCGGACGAACTGCTGCTG |
| 11920 | E2F4 | ATGGGCTCAAAGGAGGTAGAA |
| 11930 | E2F4 | TGACAGCTCTTTGGGGAGTTC |
| 11940 | E2F4 | CTGACAGCTCTTTGGGGAGTT |
| 11950 | E2F4 | TGAGGACATCAACTCCTCCAG |
| 11960 | E2F4 | CAGGGCCACCCACCTTCTGAG |
| 11970 | E2F4 | TAGATATAATCGTGGTCTCCC |
| 11980 | E2F4 | ACTCTCGTCCAGGTTGTAGAT |
| 11990 | G6PD | TGGGGGTTCACCCACTTGTAG |
| 12000 | G6PD | ACCCACTTGTAGGTGCCCTCA |
| 12010 | G6PD | TAGGTGCCCTCATACTGGAAA |
| 12020 | G6PD | ATCAGCTCGTCTGCCTCCGTG |
| 12030 | G6PD | CCTCACCTGCCATAAATATAG |
| 12040 | G6PD | CTCACCTGCCATAAATATAGG |
| 12050 | G6PD | GGCTTCTCCAGCTCAATCTGG |
| 12060 | G6PD | TCCAGCTCAATCTGGTGCAGC |
| 12070 | G6PD | TCTGTAGGGCACCTTGTATCT |
| 12080 | G6PD | TATCTGTTGCCGTAGGTCAGG |
| 12090 | G6PD | CCGTAGGTCAGGTCCAGCTCC |
| 12100 | G6PD | AAGAACATGCCCGGCTTCTTG |
| 12110 | G6PD | TTGGTCATCATCTTGGTGTAC |
| 12120 | G6PD | GTCATCATCTTGGTGTACACG |
| 12130 | G6PD | GTGTACACGGCCTCGTTGGGC |
| 12140 | G6PD | GGCTGCACGCGGATCACCAGC |
| 12150 | G6PD | CGCTTGCACTGCTGGTGGAAG |
| 12160 | G6PD | CACTGCTGGTGGAAGATGTCG |
| 12170 | G6PD | CGCTCGTTCAGGGCCTTGCCG |
| 12180 | G6PD | AGGGCCTTGCCGCAGCGCAGG |
| 12190 | G6PD | CCGCAGCGCAGGATGAAGGGC |
| 12200 | G6PD | CAGTATGAGGGCACCTACAAG |
| 12210 | G6PD | CCAGTATGAGGGCACCTACAA |
| 12220 | G6PD | AGCTGGAGAAGCCCAAGCCCA |
| 12230 | G6PD | ACCCCACTGCTGCACCAGATT |
| 12240 | G6PD | CACCCCACTGCTGCACCAGAT |
| 12250 | G6PD | TCACCCCACTGCTGCACCAGA |
| 12260 | G6PD | TGCGGGAGCCAGATGCACTTC |
| 12270 | G6PD | AACCCCGAGGAGTCGGAGCTG |
| 12280 | G6PD | TTCAACCCCGAGGAGTCGGAG |
| 12290 | G6PD | CACCAGCAGTGCAAGCGCAAC |
| 12300 | G6PD | CATGATGTGGCCGGCGACATC |
| 12310 | G6PD | ATCCTGCGCTGCGGCAAGGCC |
| 12320 | G6PD | CGCCACGTAGGGGTGCCCTTC |
| 12330 | G6PD | CCGCCACGTAGGGGTGCCCTT |
| 12340 | KIF11 | ATGAAGATAAATTGATAGCAC |
| 12350 | KIF11 | ATAGCACAAAATCTAGAACTT |
| 12360 | KIF11 | ATGAAACCATAAAAATTGGTT |
| 12370 | KIF11 | GTTTGACTAAGCTTAATTGCT |
| 12380 | KIF11 | GACTAAGCTTAATTGCTTTCT |
| 12390 | KIF11 | ACTAAGCTTAATTGCTTTCTG |
| 12400 | KIF11 | ATTGCTTTCTGGAACAGGATC |
| 12410 | KIF11 | CTTTCTGGAACAGGATCTGAA |
| 12420 | KIF11 | CTGGAACAGGATCTGAAACTG |
| 12430 | KIF11 | TGGAACAGGATCTGAAACTGG |
| 12440 | KIF11 | TCTAATGTCCGTTAAAGGTAC |
| 12450 | KIF11 | AAGGTACGACACCACAGAGGA |
| 12460 | KIF11 | TTTATACCCATCAACACTGGT |
| 12470 | KIF11 | ATACCCATCAACACTGGTAAG |
| 12480 | KIF11 | TACCCATCAACACTGGTAAGA |
| 12490 | KIF11 | ATCAGCTGAAAAGGAAACAGC |
| 12500 | KIF11 | ATGATGCTAAACTGTTCAGAA |
| 12510 | KIF11 | AGAAAACAACAAAGAAGAGAC |
| 12520 | KIF11 | CTTCTTTTAGGATGTGGATGT |
| 12530 | KIF11 | TTCTTTTAGGATGTGGATGTA |
| 12540 | KIF11 | TTTTAGGATGTGGATGTAGAA |
| 12550 | KIF11 | TAGGATGTGGATGTAGAAGAG |
| 12560 | KIF11 | AGGATGTGGATGTAGAAGAGG |
| 12570 | KIF11 | GGATGTGGATGTAGAAGAGGC |
| 12580 | KIF11 | TGGGGCAGTATACTGAAGAAC |
| 12590 | KIF11 | TTCATCAATTGGCGGGGTTCC |
| 12600 | KIF11 | ATCAATTGGCGGGGTTCCATT |
| 12610 | KIF11 | GCGGGGTTCCATTTTTCCAGG |
| 12620 | KIF11 | TCCCGCCTTAAATCCACAGCA |
| 12630 | KIF11 | CCCGCCTTAAATCCACAGCAT |
| 12640 | KIF11 | CCGCCTTAAATCCACAGCATA |
| 12650 | KIF11 | AATCCACAGCATAAAAAATCA |
| 12660 | KIF11 | ACACACTGGAGAGGTCTAAAG |
| 12670 | KIF11 | GTTACAAAGAGCAGATTACCT |
| 12680 | KIF11 | CAAAGAGCAGATTACCTCTGC |
| 12690 | KIF11 | CCTCTGCGAGCCCAGATCAAC |
| 12700 | KIF11 | TAGATTTTGTGCTATCAATTT |
| 12710 | KIF11 | AGTTCTAGATTTTGTGCTATC |
| 12720 | KIF11 | ATTAAGTTCTAGATTTTGTGC |
| 12730 | KIF11 | CATTAAGTTCTAGATTTTGTG |
| 12740 | KIF11 | TGGTTTCATTAAGTTCTAGAT |
| 12750 | KIF11 | ATGGTTTCATTAAGTTCTAGA |
| 12760 | KIF11 | TATGGTTTCATTAAGTTCTAG |
| 12770 | KIF11 | TTATGGTTTCATTAAGTTCTA |
| 12780 | KIF11 | GTCAAACCAATTTTTATGGTT |
| 12790 | KIF11 | AGCTTAGTCAAACCAATTTTT |
| 12800 | KIF11 | CAGAAAGCAATTAAGCTTAGT |
| 12810 | KIF11 | AGATCCTGTTCCAGAAAGCAA |
| 12820 | KIF11 | CAGATCCTGTTCCAGAAAGCA |
| 12830 | KIF11 | GGATATCCAGTTTCAGATCCT |
| 12840 | KIF11 | AAGTACCTGTTGGGATATCCA |
| 12850 | KIF11 | AAAGTACCTGTTGGGATATCC |
| 12860 | KIF11 | TAAAGTACCTGTTGGGATATC |
| 12870 | KIF11 | TCTTTTAAAGTACCTGTTGGG |
| 12880 | KIF11 | CTCTTTTAAAGTACCTGTTGG |
| 12890 | KIF11 | TATTTCTCTTTTAAAGTACCT |
| 12900 | KIF11 | CTCTGTGGTGTCGTACCTTTA |
| 12910 | KIF11 | CCTCTGTGGTGTCGTACCTTT |
| 12920 | KIF11 | TCCTCTGTGGTGTCGTACCTT |
| 12930 | KIF11 | ATGGGTATAAATAACTTTTCC |
| 12940 | KIF11 | CCAGTGTTGATGGGTATAAAT |
| 12950 | KIF11 | TTACCAGTGTTGATGGGTATA |
| 12960 | KIF11 | AGTTCTTACCAGTGTTGATGG |
| 12970 | KIF11 | ACGTGGTTCAGTTCTTACCAG |
| 12980 | KIF11 | AGCTGATCAAGGAGATGTTCA |
| 12990 | KIF11 | CAGCTGATCAAGGAGATGTTC |
| 13000 | KIF11 | TCAGCTGATCAAGGAGATGTT |
| 13010 | KIF11 | CTTTTCAGCTGATCAAGGAGA |
| 13020 | KIF11 | CCTTTTCAGCTGATCAAGGAG |
| 13030 | KIF11 | ACAGCTCAGGCTGTTTCCTTT |
| 13040 | KIF11 | GCATCATTAACAGCTCAGGCT |
| 13050 | KIF11 | AGCATCATTAACAGCTCAGGC |
| 13060 | KIF11 | TGAACAGTTTAGCATCATTAA |
| 13070 | KIF11 | CTGAACAGTTTAGCATCATTA |
| 13080 | KIF11 | TCTGAACAGTTTAGCATCATT |
| 13090 | KIF11 | TTTTCTGAACAGTTTAGCATC |
| 13100 | KIF11 | TTGTTTTCTGAACAGTTTAGC |
| 13110 | KIF11 | TTTGTTGTTTTCTGAACAGTT |
| 13120 | KIF11 | TCTCTTCTTTGTTGTTTTCTG |
| 13130 | KIF11 | CCGGAATTGTCTCTTCTTTGT |
| 13140 | KIF11 | ACCGGAATTGTCTCTTCTTTG |
| 13150 | KIF11 | AATTTACCGGAATTGTCTCTT |
| 13160 | KIF11 | AAATTTACCGGAATTGTCTCT |
| 13170 | KIF11 | AGTATACTGCCCCAGAACTGC |
| 13180 | KIF11 | TTCAGTATACTGCCCCAGAAC |
| 13190 | KIF11 | GAGGTTCTTCAGTATACTGCC |
| 13200 | KIF11 | ACTTAGAGGTTCTTCAGTATA |
| 13210 | KIF11 | ATGAACAATCCACACCAGCAT |
| 13220 | KIF11 | TCTGATATGACATACCTGGAA |
| 13230 | KIF11 | CATGTGATTTTTTATGCTGTG |
| 13240 | KIF11 | CCATGTGATTTTTTATGCTGT |
| 13250 | KIF11 | TCCATGTGATTTTTTATGCTG |
| 13260 | KIF11 | TCTTTTCCATGTGATTTTTTA |
| 13270 | KIF11 | GTCTTTTCCATGTGATTTTTT |
| 13280 | KIF11 | TTTGTCTTTTCCATGTGATTT |
| 13290 | KIF11 | CTTTGTCTTTTCCATGTGATT |
| 13300 | KIF11 | TCTTTGTCTTTTCCATGTGAT |
| 13310 | KIF11 | ATGCCTCTGTTTTCTTTGTCT |
| 13320 | KIF11 | GACCTCTCCAGTGTGTTAATG |
| 13330 | KIF11 | AGACCTCTCCAGTGTGTTAAT |
| 13340 | KIF11 | CACTTTAGACCTCTCCAGTGT |
| 13350 | KIF11 | TTCCACTTTAGACCTCTCCAG |
| 13360 | KIF11 | CTTCCACTTTAGACCTCTCCA |
| 13370 | KIF11 | TAACCAAGTGCTCTGTAGTTT |
| 13380 | KIF11 | GTAACCAAGTGCTCTGTAGTT |
| 13390 | KIF11 | ATCTGGGCTCGCAGAGGTAAT |
| 13400 | KIF11 | AAGGTTGATCTGGGCTCGCAG |
| 13410 | KIF11 | CCAACCCCCAAGTGAATTAAA |
| — | — | — |

TABLE 24
Mad7 guide RNAs

| SEQ | | Target Domain Sequence |
|---|---|---|
| ID NO | Gene | (DNA) |
| 13420 | GAPDH | TGCAGACCACAGTCCATGCCA |
| 13430 | GAPDH | GCAGACCACAGTCCATGCCAT |
| 13440 | GAPDH | CAGACCACAGTCCATGCCATC |
| 13450 | GAPDH | TCATCTTCTAGGTATGACAAC |
| 13460 | GAPDH | CATCTTCTAGGTATGACAACG |
| 13470 | GAPDH | ATCTTCTAGGTATGACAACGA |
| 13480 | GAPDH | TAGGTATGACAACGAATTTGG |
| 13490 | GAPDH | CCCAGCTCTCATACCATGAGT |
| 13500 | TBP | TATCCACAGTGAATCTTGGTT |
| 13510 | TBP | GTTGTAAACTTGACCTAAAGA |
| 13520 | TBP | TAAACTTGACCTAAAGACCAT |
| 13530 | TBP | ACCTAAAGACCATTGCACTTC |
| 13540 | TBP | CACTTCGTGCCCGAAACGCCG |
| 13550 | TBP | GTGCCCGAAACGCCGAATATA |
| 13560 | TBP | TCTCTGACCATTGTAGCGGTT |
| 13570 | TBP | TAGCGGTTTGCTGCGGTAATC |
| 13580 | TBP | GCTGCGGTAATCATGAGGATA |
| 13590 | TBP | CTGCGGTAATCATGAGGATAA |
| 13600 | TBP | TCAGTTCTGGGAAAATGGTGT |
| 13610 | TBP | CAGTTCTGGGAAAATGGTGTG |
| 13620 | TBP | AGTTCTGGGAAAATGGTGTGC |
| 13630 | TBP | TGGGAAAATGGTGTGCACAGG |
| 13640 | TBP | TTTCCTTTCCCTAGTGAAGAA |
| 13650 | TBP | TTCCTTTCCCTAGTGAAGAAC |
| 13660 | TBP | TCCTTTCCCTAGTGAAGAACA |
| 13670 | TBP | CCTTTCCCTAGTGAAGAACAG |
| 13680 | TBP | CTTTCCCTAGTGAAGAACAGT |
| 13690 | TBP | CCCTAGTGAAGAACAGTCCAG |
| 13700 | TBP | CCTAGTGAAGAACAGTCCAGA |
| 13710 | TBP | TACAGAAGTTGGGTTTTCCAG |
| 13720 | TBP | GGTTTTCCAGCTAAGTTCTTG |
| 13730 | TBP | TCCAGCTAAGTTCTTGGACTT |
| 13740 | TBP | CCAGCTAAGTTCTTGGACTTC |
| 13750 | TBP | CAGCTAAGTTCTTGGACTTCA |
| 13760 | TBP | TTGGACTTCAAGATTCAGAAT |
| 13770 | TBP | GACTTCAAGATTCAGAATATG |
| 13780 | TBP | AAGATTCAGAATATGGTGGGG |
| 13790 | TBP | AGAATATGGTGGGGAGCTGTG |
| 13800 | TBP | CCTATAAGGTTAGAAGGCCTT |
| 13810 | TBP | CTATAAGGTTAGAAGGCCTTG |
| 13820 | TBP | TGCTCACCCACCAACAATTTA |
| 13830 | TBP | TTGCAATTTTCCTTCTAGTTA |
| 13840 | TBP | TGCAATTTTCCTTCTAGTTAT |
| 13850 | TBP | GCAATTTTCCTTCTAGTTATG |
| 13860 | TBP | CAATTTTCCTTCTAGTTATGA |
| 13870 | TBP | TCCTTCTAGTTATGAGCCAGA |
| 13880 | TBP | CCTTCTAGTTATGAGCCAGAG |
| 13890 | TBP | CTTCTAGTTATGAGCCAGAGT |
| 13900 | TBP | TAGTTATGAGCCAGAGTTATT |
| 13910 | TBP | TGAGCCAGAGTTATTTCCTGG |
| 13920 | TBP | CCTGGTTTAATCTACAGAATG |
| 13930 | TBP | CTGGTTTAATCTACAGAATGA |
| 13940 | TBP | AATCTACAGAATGATCAAACC |
| 13950 | TBP | ATCTACAGAATGATCAAACCC |
| 13960 | TBP | TTCTCCTTATTTTTGTTTCTG |
| 13970 | TBP | TCCTTATTTTTGTTTCTGGAA |
| 13980 | TBP | TTTTTGTTTCTGGAAAAGTTG |
| 13990 | TBP | TTGTTTCTGGAAAAGTTGTAT |
| 14000 | TBP | TGTTTCTGGAAAAGTTGTATT |
| 14010 | TBP | GTTTCTGGAAAAGTTGTATTA |
| 14020 | TBP | TTTCTGGAAAAGTTGTATTAA |
| 14030 | TBP | CTGGAAAAGTTGTATTAACAG |
| 14040 | TBP | TGGAAAAGTTGTATTAACAGG |
| 14050 | TBP | TCTTCTTAGGTGCTAAAGTCA |
| 14060 | TBP | TTAGGTGCTAAAGTCAGAGCA |
| 14070 | TBP | GGTGCTAAAGTCAGAGCAGAA |
| 14080 | TBP | TAAAGGGATTCAGGAAGACGA |
| 14090 | TBP | GGTCAAGTTTACAACCAAGAT |
| 14100 | TBP | AGGTCAAGTTTACAACCAAGA |
| 14110 | TBP | GGGCACGAAGTGCAATGGTCT |
| 14120 | TBP | CGGGCACGAAGTGCAATGGTC |
| 14130 | TBP | GGCGTTTCGGGCACGAAGTGC |
| 14140 | TBP | TATTCGGCGTTTCGGGCACGA |
| 14150 | TBP | GGATTATATTCGGCGTTTCGG |
| 14160 | TBP | AAATAGATCTAACCTTGGGAT |
| 14170 | TBP | TCCTCATGATTACCGCAGCAA |
| 14180 | TBP | GTGGCTCTCTTATCCTCATGA |
| 14190 | TBP | CCAGAACTGAAAATCAGTGCC |
| 14200 | TBP | CCCAGAACTGAAAATCAGTGC |
| 14210 | TBP | TCCCAGAACTGAAAATCAGTG |
| 14220 | TBP | GCTCCTGTGCACACCATTTTC |
| 14230 | TBP | CGGCTACCTCTTGGCTCCTGT |
| 14240 | TBP | TTACGGCTACCTCTTGGCTCC |
| 14250 | TBP | CTTACGGCTACCTCTTGGCTC |
| 14260 | TBP | CTGCCAGTCTGGACTGTTCTT |
| 14270 | TBP | TTGCTGCCAGTCTGGACTGTT |
| 14280 | TBP | CTTGCTGCCAGTCTGGACTGT |
| 14290 | TBP | TCTTGCTGCCAGTCTGGACTG |
| 14300 | TBP | TGTACAACTCTAGCATATTTT |
| 14310 | TBP | GCTGGAAAACCCAACTTCTGT |
| 14320 | TBP | AAGTCCAAGAACTTAGCTGGA |
| 14330 | TBP | TGAATCTTGAAGTCCAAGAAC |
| 14340 | TBP | ACATCACAGCTCCCCACCATA |
| 14350 | TBP | TAACCTTATAGGAAACTTCAC |
| 14360 | TBP | GTGGGTGAGCACAAGGCCTTC |
| 14370 | TBP | TTGGTGGGTGAGCACAAGGCC |
| 14380 | TBP | CCTACTAAATTGTTGGTGGGT |
| 14390 | TBP | AGACTTACCTACTAAATTGTT |
| 14400 | TBP | CAGACTTACCTACTAAATTGT |
| 14410 | TBP | AACCAGGAAATAACTCTGGCT |
| 14420 | TBP | TGTAGATTAAACCAGGAAATA |
| 14430 | TBP | ATCATTCTGTAGATTAAACCA |
| 14440 | TBP | GATCATTCTGTAGATTAAACC |
| 14450 | TBP | TGGGTTTGATCATTCTGTAGA |
| 14460 | TBP | CAGAAACAAAAATAAGGAGAA |
| 14470 | TBP | CCAGAAACAAAAATAAGGAGA |
| 14480 | TBP | TCCAGAAACAAAAATAAGGAG |
| 14490 | TBP | ATACAACTTTTCCAGAAACAA |
| 14500 | TBP | CCTGTTAATACAACTTTTCCA |
| 14510 | TBP | CAACTTACCTGTTAATACAAC |
| 14520 | TBP | CTGTTACAACTTACCTGTTAA |
| 14530 | TBP | ATAAATTTCTGCTCTGACTTT |
| 14540 | TBP | AAATGCTTCATAAATTTCTGC |
| 14550 | TBP | CAAATGCTTCATAAATTTCTG |
| 14560 | TBP | TCAAATGCTTCATAAATTTCT |
| 14570 | TBP | CTGAATCCCTTTAGAATAGGG |
| 14580 | TBP | CGTCGTCTTCCTGAATCCCTT |
| 14590 | E2F4 | GGGGGCTATCATTGTAGTGAG |
| 14600 | E2F4 | GGGGCTATCATTGTAGTGAGT |
| 14610 | E2F4 | TAGTGAGTGGCGGCCCTGGGA |
| 14620 | E2F4 | ACTCCCACTGGGCCCAACAAC |
| 14630 | E2F4 | TGCCCTGCTGGACAGCAGCAG |
| 14640 | E2F4 | GTCCGGACCCAACCCTTCTAC |
| 14650 | E2F4 | TACCTCCTTTGAGCCCATCAA |
| 14660 | E2F4 | GAGCCCATCAAGGCAGACCCC |
| 14670 | E2F4 | AGCCCATCAAGGCAGACCCCA |
| 14680 | E2F4 | CTTGTTTTTCAGTTTTGGAAC |
| 14690 | E2F4 | TTTTTCAGTTTTGGAACTCCC |
| 14700 | E2F4 | TTCAGTTTTGGAACTCCCCAA |
| 14710 | E2F4 | TCAGTTTTGGAACTCCCCAAA |
| 14720 | E2F4 | CAGTTTTGGAACTCCCCAAAG |
| 14730 | E2F4 | AGTTTTGGAACTCCCCAAAGA |
| 14740 | E2F4 | TGGAACTCCCCAAAGAGCTGT |
| 14750 | E2F4 | GGAACTCCCCAAAGAGCTGTC |
| 14760 | E2F4 | CCAGAGTGCATGAGCTCGGAG |
| 14770 | E2F4 | GCCCCTCTGCTTCGTCTTTCT |
| 14780 | E2F4 | CCCCTCTGCTTCGTCTTTCTC |
| 14790 | E2F4 | GTCTTTCTCCACCCCCGGGAG |
| 14800 | E2F4 | CTCCACCCCCGGGAGACCACG |
| 14810 | E2F4 | TCCACCCCCGGGAGACCACGA |
| 14820 | E2F4 | TATCTACAACCTGGACGAGAG |
| 14830 | E2F4 | GATGTGCCTGTTCTCAACCTC |
| 14840 | E2F4 | ATGTGCCTGTTCTCAACCTCT |
| 14850 | E2F4 | TGCACTGCCAGGGACAGCAGT |
| 14860 | E2F4 | CCTGGACTTCTGCACTGCCAG |
| 14870 | E2F4 | CTATCAGTCCCAGGGCCGCCA |
| 14880 | E2F4 | GGCCCAGTGGGAGTGAACTGA |
| 14890 | E2F4 | TTGGGCCCAGTGGGAGTGAAC |
| 14900 | E2F4 | GGTCCGGACGAACTGCTGCTG |
| 14910 | E2F4 | ATGGGCTCAAAGGAGGTAGAA |
| 14920 | E2F4 | TGACAGCTCTTTGGGGAGTTC |
| 14930 | E2F4 | CTGACAGCTCTTTGGGGAGTT |
| 14940 | E2F4 | TGAGGACATCAACTCCTCCAG |
| 14950 | E2F4 | CAGGGCCACCCACCTTCTGAG |
| 14960 | E2F4 | TAGATATAATCGTGGTCTCCC |
| 14970 | E2F4 | ACTCTCGTCCAGGTTGTAGAT |
| 14980 | G6PD | TGGGGGTTCACCCACTTGTAG |
| 14990 | G6PD | ACCCACTTGTAGGTGCCCTCA |
| 15000 | G6PD | TAGGTGCCCTCATACTGGAAA |
| 15010 | G6PD | ATCAGCTCGTCTGCCTCCGTG |
| 15020 | G6PD | CCTCACCTGCCATAAATATAG |
| 15030 | G6PD | CTCACCTGCCATAAATATAGG |
| 15040 | G6PD | GGCTTCTCCAGCTCAATCTGG |
| 15050 | G6PD | TCCAGCTCAATCTGGTGCAGC |
| 15060 | G6PD | TCTGTAGGGCACCTTGTATCT |
| 15070 | G6PD | TATCTGTTGCCGTAGGTCAGG |
| 15080 | G6PD | CCGTAGGTCAGGTCCAGCTCC |
| 15090 | G6PD | AAGAACATGCCCGGCTTCTTG |
| 15100 | G6PD | TTGGTCATCATCTTGGTGTAC |
| 15110 | G6PD | GTCATCATCTTGGTGTACACG |
| 15120 | G6PD | GTGTACACGGCCTCGTTGGGC |
| 15130 | G6PD | GGCTGCACGCGGATCACCAGC |
| 15140 | G6PD | CGCTTGCACTGCTGGTGGAAG |
| 15150 | G6PD | CACTGCTGGTGGAAGATGTCG |
| 15160 | G6PD | CGCTCGTTCAGGGCCTTGCCG |
| 15170 | G6PD | AGGGCCTTGCCGCAGCGCAGG |
| 15180 | G6PD | CCGCAGCGCAGGATGAAGGGC |
| 15190 | G6PD | CAGTATGAGGGCACCTACAAG |
| 15200 | G6PD | CCAGTATGAGGGCACCTACAA |
| 15210 | G6PD | AGCTGGAGAAGCCCAAGCCCA |
| 15220 | G6PD | ACCCCACTGCTGCACCAGATT |
| 15230 | G6PD | CACCCCACTGCTGCACCAGAT |
| 15240 | G6PD | TCACCCCACTGCTGCACCAGA |
| 15250 | G6PD | TGCGGGAGCCAGATGCACTTC |
| 15260 | G6PD | AACCCCGAGGAGTCGGAGCTG |
| 15270 | G6PD | TTCAACCCCGAGGAGTCGGAG |
| 15280 | G6PD | CACCAGCAGTGCAAGCGCAAC |
| 15290 | G6PD | CATGATGTGGCCGGCGACATC |
| 15300 | G6PD | ATCCTGCGCTGCGGCAAGGCC |
| 15310 | G6PD | CGCCACGTAGGGGTGCCCTTC |
| 15320 | G6PD | CCGCCACGTAGGGGTGCCCTT |
| 15330 | KIF11 | ATGAAGATAAATTGATAGCAC |
| 15340 | KIF11 | ATAGCACAAAATCTAGAACTT |
| 15350 | KIF11 | ATGAAACCATAAAAATTGGTT |
| 15360 | KIF11 | GTTTGACTAAGCTTAATTGCT |
| 15370 | KIF11 | GACTAAGCTTAATTGCTTTCT |
| 15380 | KIF11 | ACTAAGCTTAATTGCTTTCTG |
| 15390 | KIF11 | ATTGCTTTCTGGAACAGGATC |
| 15400 | KIF11 | CTTTCTGGAACAGGATCTGAA |
| 15410 | KIF11 | CTGGAACAGGATCTGAAACTG |
| 15420 | KIF11 | TGGAACAGGATCTGAAACTGG |
| 15430 | KIF11 | TCTAATGTCCGTTAAAGGTAC |
| 15440 | KIF11 | AAGGTACGACACCACAGAGGA |
| 15450 | KIF11 | TTTATACCCATCAACACTGGT |
| 15460 | KIF11 | ATACCCATCAACACTGGTAAG |
| 15470 | KIF11 | TACCCATCAACACTGGTAAGA |
| 15480 | KIF11 | ATCAGCTGAAAAGGAAACAGC |
| 15490 | KIF11 | ATGATGCTAAACTGTTCAGAA |
| 15500 | KIF11 | AGAAAACAACAAAGAAGAGAC |
| 15510 | KIF11 | CTTCTTTTAGGATGTGGATGT |
| 15520 | KIF11 | TTCTTTTAGGATGTGGATGTA |
| 15530 | KIF11 | TTTTAGGATGTGGATGTAGAA |
| 15540 | KIF11 | TAGGATGTGGATGTAGAAGAG |
| 15550 | KIF11 | AGGATGTGGATGTAGAAGAGG |
| 15560 | KIF11 | GGATGTGGATGTAGAAGAGGC |
| 15570 | KIF11 | TGGGGCAGTATACTGAAGAAC |
| 15580 | KIF11 | TTCATCAATTGGCGGGGTTCC |
| 15590 | KIF11 | ATCAATTGGCGGGGTTCCATT |
| 15600 | KIF11 | GCGGGGTTCCATTTTTCCAGG |
| 15610 | KIF11 | TCCCGCCTTAAATCCACAGCA |
| 15620 | KIF11 | CCCGCCTTAAATCCACAGCAT |
| 15630 | KIF11 | CCGCCTTAAATCCACAGCATA |
| 15640 | KIF11 | AATCCACAGCATAAAAAATCA |
| 15650 | KIF11 | ACACACTGGAGAGGTCTAAAG |
| 15660 | KIF11 | GTTACAAAGAGCAGATTACCT |
| 15670 | KIF11 | CAAAGAGCAGATTACCTCTGC |
| 15680 | KIF11 | CCTCTGCGAGCCCAGATCAAC |
| 15690 | KIF11 | TAGATTTTGTGCTATCAATTT |
| 15700 | KIF11 | AGTTCTAGATTTTGTGCTATC |
| 15710 | KIF11 | ATTAAGTTCTAGATTTTGTGC |
| 15720 | KIF11 | CATTAAGTTCTAGATTTTGTG |
| 15730 | KIF11 | TGGTTTCATTAAGTTCTAGAT |
| 15740 | KIF11 | ATGGTTTCATTAAGTTCTAGA |
| 15750 | KIF11 | TATGGTTTCATTAAGTTCTAG |
| 15760 | KIF11 | TTATGGTTTCATTAAGTTCTA |
| 15770 | KIF11 | GTCAAACCAATTTTTATGGTT |
| 15780 | KIF11 | AGCTTAGTCAAACCAATTTTT |
| 15790 | KIF11 | CAGAAAGCAATTAAGCTTAGT |
| 15800 | KIF11 | AGATCCTGTTCCAGAAAGCAA |
| 15810 | KIF11 | CAGATCCTGTTCCAGAAAGCA |
| 15820 | KIF11 | GGATATCCAGTTTCAGATCCT |
| 15830 | KIF11 | AAGTACCTGTTGGGATATCCA |
| 15840 | KIF11 | AAAGTACCTGTTGGGATATCC |
| 15850 | KIF11 | TAAAGTACCTGTTGGGATATC |
| 15860 | KIF11 | TCTTTTAAAGTACCTGTTGGG |
| 15870 | KIF11 | CTCTTTTAAAGTACCTGTTGG |
| 15880 | KIF11 | TATTTCTCTTTTAAAGTACCT |
| 15890 | KIF11 | ATGGGTATAAATAACTTTTCC |
| 15900 | KIF11 | CCAGTGTTGATGGGTATAAAT |
| 15910 | KIF11 | TTACCAGTGTTGATGGGTATA |
| 15920 | KIF11 | AGTTCTTACCAGTGTTGATGG |
| 15930 | KIF11 | ACGTGGTTCAGTTCTTACCAG |
| 15940 | KIF11 | AGCTGATCAAGGAGATGTTCA |
| 15950 | KIF11 | CAGCTGATCAAGGAGATGTTC |
| 15960 | KIF11 | TCAGCTGATCAAGGAGATGTT |
| 15970 | KIF11 | CTTTTCAGCTGATCAAGGAGA |
| 15980 | KIF11 | CCTTTTCAGCTGATCAAGGAG |
| 15990 | KIF11 | ACAGCTCAGGCTGTTTCCTTT |
| 16000 | KIF11 | GCATCATTAACAGCTCAGGCT |
| 16010 | KIF11 | AGCATCATTAACAGCTCAGGC |
| 16020 | KIF11 | TGAACAGTTTAGCATCATTAA |
| 16030 | KIF11 | CTGAACAGTTTAGCATCATTA |
| 16040 | KIF11 | TCTGAACAGTTTAGCATCATT |
| 16050 | KIF11 | TTTTCTGAACAGTTTAGCATC |
| 16060 | KIF11 | TTGTTTTCTGAACAGTTTAGC |
| 16070 | KIF11 | TTTGTTGTTTTCTGAACAGTT |
| 16080 | KIF11 | TCTCTTCTTTGTTGTTTTCTG |
| 16090 | KIF11 | CCGGAATTGTCTCTTCTTTGT |
| 16100 | KIF11 | ACCGGAATTGTCTCTTCTTTG |
| 16110 | KIF11 | AATTTACCGGAATTGTCTCTT |
| 16120 | KIF11 | AAATTTACCGGAATTGTCTCT |
| 16130 | KIF11 | AGTATACTGCCCCAGAACTGC |
| 16140 | KIF11 | TTCAGTATACTGCCCCAGAAC |
| 16150 | KIF11 | GAGGTTCTTCAGTATACTGCC |
| 16160 | KIF11 | ACTTAGAGGTTCTTCAGTATA |
| 16170 | KIF11 | ATGAACAATCCACACCAGCAT |
| 16180 | KIF11 | TCTGATATGACATACCTGGAA |
| 16190 | KIF11 | TCTTTTCCATGTGATTTTTTA |
| 16200 | KIF11 | GTCTTTTCCATGTGATTTTTT |
| 16210 | KIF11 | TTTGTCTTTTCCATGTGATTT |
| 16220 | KIF11 | CTTTGTCTTTTCCATGTGATT |
| 16230 | KIF11 | TCTTTGTCTTTTCCATGTGAT |
| 16240 | KIF11 | ATGCCTCTGTTTTCTTTGTCT |
| 16250 | KIF11 | GACCTCTCCAGTGTGTTAATG |
| 16260 | KIF11 | AGACCTCTCCAGTGTGTTAAT |
| 16270 | KIF11 | CACTTTAGACCTCTCCAGTGT |
| 16280 | KIF11 | TTCCACTTTAGACCTCTCCAG |
| 16290 | KIF11 | CTTCCACTTTAGACCTCTCCA |
| 16300 | KIF11 | TAACCAAGTGCTCTGTAGTTT |
| 16310 | KIF11 | GTAACCAAGTGCTCTGTAGTT |
| 16320 | KIF11 | ATCTGGGCTCGCAGAGGTAAT |
| 16330 | KIF11 | AAGGTTGATCTGGGCTCGCAG |
| 16340 | KIF11 | CCAACCCCCAAGTGAATTAAA |
| — | — | — |

TABLE 25
SpyCas9 guide RNAs

| SEQ | | Target Domain Sequence |
|---|---|---|
| ID NO | Gene | (DNA) |
| 16350 | GAPDH | TCTAGGTATGACAACGAATT |
| 16360 | GAPDH | AGCCCCAGCGTCAAAGGTGG |
| 16370 | TBP | ATTGTATCCACAGTGAATCT |
| 16380 | TBP | AAACGCCGAATATAATCCCA |
| 16390 | TBP | ACCATTGTAGCGGTTTGCTG |
| 16400 | TBP | GGTTTGCTGCGGTAATCATG |
| 16410 | TBP | GATAAGAGAGCCACGAACCA |
| 16420 | TBP | ACGGCACTGATTTTCAGTTC |
| 16430 | TBP | CGGCACTGATTTTCAGTTCT |
| 16440 | TBP | GATTTTCAGTTCTGGGAAAA |
| 16450 | TBP | TCTGGGAAAATGGTGTGCAC |
| 16460 | TBP | TGGTGTGCACAGGAGCCAAG |
| 16470 | TBP | TAGTGAAGAACAGTCCAGAC |
| 16480 | TBP | TGCTAGAGTTGTACAGAAGT |
| 16490 | TBP | GCTAGAGTTGTACAGAAGTT |
| 16500 | TBP | GGGTTTTCCAGCTAAGTTCT |
| 16510 | TBP | GGACTTCAAGATTCAGAATA |
| 16520 | TBP | CTTCAAGATTCAGAATATGG |
| 16530 | TBP | TTCAAGATTCAGAATATGGT |
| 16540 | TBP | TCAAGATTCAGAATATGGTG |
| 16550 | TBP | GTGATGTGAAGTTTCCTATA |
| 16560 | TBP | AAGTTTCCTATAAGGTTAGA |
| 16570 | TBP | TCACCCACCAACAATTTAGT |
| 16580 | TBP | TATGAGCCAGAGTTATTTCC |
| 16590 | TBP | GTTCTCCTTATTTTTGTTTC |
| 16600 | TBP | TCTGGAAAAGTTGTATTAAC |
| 16610 | TBP | AAACATCTACCCTATTCTAA |
| 16620 | TBP | ACCCTATTCTAAAGGGATTC |
| 16630 | TBP | GATTCAGGAAGACGACGTAA |
| 16640 | TBP | CACGAAGTGCAATGGTCTTT |
| 16650 | TBP | GTTTCGGGCACGAAGTGCAA |
| 16660 | TBP | GGGATTATATTCGGCGTTTC |
| 16670 | TBP | TGGGATTATATTCGGCGTTT |
| 16680 | TBP | TCTAACCTTGGGATTATATT |
| 16690 | TBP | ATTAAAATAGATCTAACCTT |
| 16700 | TBP | AAAATCAGTGCCGTGGTTCG |
| 16710 | TBP | AGAACTGAAAATCAGTGCCG |
| 16720 | TBP | AATTTCTTACGGCTACCTCT |
| 16730 | TBP | AGTCTGGACTGTTCTTCACT |
| 16740 | TBP | ATATTTTCTTGCTGCCAGTC |
| 16750 | TBP | TTGAAGTCCAAGAACTTAGC |
| 16760 | TBP | ACAAGGCCTTCTAACCTTAT |
| 16770 | TBP | ATTGTTGGTGGGTGAGCACA |
| 16780 | TBP | TTACCTACTAAATTGTTGGT |
| 16790 | TBP | CTTACCTACTAAATTGTTGG |
| 16800 | TBP | AGACTTACCTACTAAATTGT |
| 16810 | TBP | ATTAAACCAGGAAATAACTC |
| 16820 | TBP | ATCATTCTGTAGATTAAACC |
| 16830 | TBP | AAAATAAGGAGAACAATTCT |
| 16840 | TBP | CTTTTCCAGAAACAAAAATA |
| 16850 | TBP | TCCTGAATCCCTTTAGAATA |
| 16860 | TBP | TTCCTGAATCCCTTTAGAAT |
| 16870 | E2F4 | CTCACTCCCACTGCTGTCCC |
| 16880 | E2F4 | CCCTGGCAGTGCAGAAGTCC |
| 16890 | E2F4 | CCTGGCAGTGCAGAAGTCCA |
| 16900 | E2F4 | CAGTGCAGAAGTCCAGGGAA |
| 16910 | E2F4 | GCAGAAGTCCAGGGAATGGC |
| 16920 | E2F4 | GGCCCAGCAGCTGAGATCAC |
| 16930 | E2F4 | GGGGCTATCATTGTAGTGAG |
| 16940 | E2F4 | GCTATCATTGTAGTGAGTGG |
| 16950 | E2F4 | ATTGTAGTGAGTGGCGGCCC |
| 16960 | E2F4 | TTGTAGTGAGTGGCGGCCCT |
| 16970 | E2F4 | CGGCCCTGGGACTGATAGCA |
| 16980 | E2F4 | GGGACTGATAGCAAGGACAG |
| 16990 | E2F4 | TGAGCTCAGTTCACTCCCAC |
| 17000 | E2F4 | GAGCTCAGTTCACTCCCACT |
| 17010 | E2F4 | CCCACTGGGCCCAACAACAC |
| 17020 | E2F4 | GCCCAACAACACTGGACACC |
| 17030 | E2F4 | ACTGCAGTCTTCTGCCCTGC |
| 17040 | E2F4 | AGTAACAGCAGCAGTTCGTC |
| 17050 | E2F4 | TACCTCCTTTGAGCCCATCA |
| 17060 | E2F4 | CCCATCAAGGCAGACCCCAC |
| 17070 | E2F4 | ATCAAGGCAGACCCCACAGG |
| 17080 | E2F4 | GAAATCTTTGATCCCACACG |
| 17090 | E2F4 | TCTTTGATCCCACACGAGGT |
| 17100 | E2F4 | ATTCCCAGAGTGCATGAGCT |
| 17110 | E2F4 | GTGCATGAGCTCGGAGCTGC |
| 17120 | E2F4 | GAGGAGTTGATGTCCTCAGA |
| 17130 | E2F4 | GAGTTGATGTCCTCAGAAGG |
| 17140 | E2F4 | AGTTGATGTCCTCAGAAGGT |
| 17150 | E2F4 | GCTTCGTCTTTCTCCACCCC |
| 17160 | E2F4 | CTTCGTCTTTCTCCACCCCC |
| 17170 | E2F4 | CCACGATTATATCTACAACC |
| 17180 | E2F4 | TACAACCTGGACGAGAGTGA |
| 17190 | E2F4 | GCACTGCCAGGGACAGCAGT |
| 17200 | E2F4 | TGCACTGCCAGGGACAGCAG |
| 17210 | E2F4 | CCTGGACTTCTGCACTGCCA |
| 17220 | E2F4 | CCCTGGACTTCTGCACTGCC |
| 17230 | E2F4 | CTGCTGGGCCAGCCATTCCC |
| 17240 | E2F4 | TGTCCTTGCTATCAGTCCCA |
| 17250 | E2F4 | CTGTCCTTGCTATCAGTCCC |
| 17260 | E2F4 | CCAGTGTTGTTGGGCCCAGT |
| 17270 | E2F4 | TCCAGTGTTGTTGGGCCCAG |
| 17280 | E2F4 | GCCGGGTGTCCAGTGTTGTT |
| 17290 | E2F4 | GGCCGGGTGTCCAGTGTTGT |
| 17300 | E2F4 | AGCAGGGCAGAAGACTGCAG |
| 17310 | E2F4 | GCTGCTGCTGCTGTCCAGCA |
| 17320 | E2F4 | GGAGGTAGAAGGGTTGGGTC |
| 17330 | E2F4 | TGGGCTCAAAGGAGGTAGAA |
| 17340 | E2F4 | ATGGGCTCAAAGGAGGTAGA |
| 17350 | E2F4 | TGCCTTGATGGGCTCAAAGG |
| 17360 | E2F4 | GTCTGCCTTGATGGGCTCAA |
| 17370 | E2F4 | CCTGTGGGGTCTGCCTTGAT |
| 17380 | E2F4 | ACCTGTGGGGTCTGCCTTGA |
| 17390 | E2F4 | GCAGGTACTCACCACCTGTG |
| 17400 | E2F4 | GGCAGGTACTCACCACCTGT |
| 17410 | E2F4 | GGGCAGGTACTCACCACCTG |
| 17420 | E2F4 | AGATTTCTGACAGCTCTTTG |
| 17430 | E2F4 | AAGATTTCTGACAGCTCTTT |
| 17440 | E2F4 | AAAGATTTCTGACAGCTCTT |
| 17450 | E2F4 | TGCAGCAGCCTACCTCGTGT |
| 17460 | E2F4 | ATGCAGCAGCCTACCTCGTG |
| 17470 | E2F4 | GCTCCGAGCTCATGCACTCT |
| 17480 | E2F4 | AGCTCCGAGCTCATGCACTC |
| 17490 | E2F4 | CCAGGGCCACCCACCTTCTG |
| 17500 | E2F4 | TGGAGAAAGACGAAGCAGAG |
| 17510 | E2F4 | GTGGAGAAAGACGAAGCAGA |
| 17520 | E2F4 | GGTGGAGAAAGACGAAGCAG |
| 17530 | E2F4 | TAATCGTGGTCTCCCGGGGG |
| 17540 | E2F4 | ATATAATCGTGGTCTCCCGG |
| 17550 | E2F4 | GATATAATCGTGGTCTCCCG |
| 17560 | E2F4 | AGATATAATCGTGGTCTCCC |
| 17570 | E2F4 | TAGATATAATCGTGGTCTCC |
| 17580 | E2F4 | CCAGGTTGTAGATATAATCG |
| 17590 | E2F4 | AGACACCTTCACTCTCGTCC |
| 17600 | E2F4 | TGAGAACAGGCACATCAAAG |
| 17610 | G6PD | GTGGGGGTTCACCCACTTGT |
| 17620 | G6PD | ACTTGTAGGTGCCCTCATAC |
| 17630 | G6PD | CATCAGCTCGTCTGCCTCCG |
| 17640 | G6PD | ATCAGCTCGTCTGCCTCCGT |
| 17650 | G6PD | TCAGCTCGTCTGCCTCCGTG |
| 17660 | G6PD | CGTCTGCCTCCGTGGGGCCT |
| 17670 | G6PD | TGCCTCCGTGGGGCCTCGGC |
| 17680 | G6PD | TCCTCACCTGCCATAAATAT |
| 17690 | G6PD | CCTCACCTGCCATAAATATA |
| 17700 | G6PD | CTCACCTGCCATAAATATAG |
| 17710 | G6PD | CCTGCCATAAATATAGGGGA |
| 17720 | G6PD | CTGCCATAAATATAGGGGAT |
| 17730 | G6PD | ATAAATATAGGGGATGGGCT |
| 17740 | G6PD | TAAATATAGGGGATGGGCTT |
| 17750 | G6PD | TGGGCTTCTCCAGCTCAATC |
| 17760 | G6PD | AGCTCAATCTGGTGCAGCAG |
| 17770 | G6PD | GCTCAATCTGGTGCAGCAGT |
| 17780 | G6PD | CTCAATCTGGTGCAGCAGTG |
| 17790 | G6PD | CAGTGGGGTGAAAATACGCC |
| 17800 | G6PD | TGAAAATACGCCAGGCCTCA |
| 17810 | G6PD | CCTCACGGAGCTCGTCGCTG |
| 17820 | G6PD | ACCTGCGCACGAAGTGCATC |
| 17830 | G6PD | GGCTCCCGCAGAAGACGTCC |
| 17840 | G6PD | CGCAGAAGACGTCCAGGATG |
| 17850 | G6PD | GTCCAGGATGAGGCGCTCAT |
| 17860 | G6PD | ATGAGGCGCTCATAGGCGTC |
| 17870 | G6PD | TGAGGCGCTCATAGGCGTCA |
| 17880 | G6PD | CACCTTGTATCTGTTGCCGT |
| 17890 | G6PD | TGTATCTGTTGCCGTAGGTC |
| 17900 | G6PD | CAGGTCCAGCTCCGACTCCT |
| 17910 | G6PD | AGGTCCAGCTCCGACTCCTC |
| 17920 | G6PD | GGTCCAGCTCCGACTCCTCG |
| 17930 | G6PD | TCGGGGTTGAAGAACATGCC |
| 17940 | G6PD | GAAGAACATGCCCGGCTTCT |
| 17950 | G6PD | CGGCTTCTTGGTCATCATCT |
| 17960 | G6PD | GGTCATCATCTTGGTGTACA |
| 17970 | G6PD | CTTGGTGTACACGGCCTCGT |
| 17980 | G6PD | TTGGTGTACACGGCCTCGTT |
| 17990 | G6PD | CGGCCTCGTTGGGCTGCACG |
| 18000 | G6PD | GCTCGTTGCGCTTGCACTGC |
| 18010 | G6PD | CGTTGCGCTTGCACTGCTGG |
| 18020 | G6PD | CTGCTGGTGGAAGATGTCGC |
| 18030 | G6PD | AGATGTCGCCGGCCACATCA |
| 18040 | G6PD | ATGGAACTGCAGCCTCACCT |
| 18050 | G6PD | CCTCGGCCTTGCGCTCGTTC |
| 18060 | G6PD | CTCGGCCTTGCGCTCGTTCA |
| 18070 | G6PD | TCAGGGCCTTGCCGCAGCGC |
| 18080 | G6PD | CTTGCCGCAGCGCAGGATGA |
| 18090 | G6PD | TTGCCGCAGCGCAGGATGAA |
| 18100 | G6PD | GTATGAGGGCACCTACAAGT |
| 18110 | G6PD | AGTATGAGGGCACCTACAAG |
| 18120 | G6PD | AGAGTGGGTTTCCAGTATGA |
| 18130 | G6PD | GAGAGTGGGTTTCCAGTATG |
| 18140 | G6PD | GACGAGCTGATGAAGAGAGT |
| 18150 | G6PD | AGACGAGCTGATGAAGAGAG |
| 18160 | G6PD | CTCCAGCCGAGGCCCCACGG |
| 18170 | G6PD | CACCCGTCACTCTCCAGCCG |
| 18180 | G6PD | CCATCCCCTATATTTATGGC |
| 18190 | G6PD | AAGCCCATCCCCTATATTTA |
| 18200 | G6PD | ACTGCTGCACCAGATTGAGC |
| 18210 | G6PD | GCGACGAGCTCCGTGAGGCC |
| 18220 | G6PD | CCTCAGCGACGAGCTCCGTG |
| 18230 | G6PD | GCCAGATGCACTTCGTGCGC |
| 18240 | G6PD | TCATCCTGGACGTCTTCTGC |
| 18250 | G6PD | CTCATCCTGGACGTCTTCTG |
| 18260 | G6PD | CGCCTATGAGCGCCTCATCC |
| 18270 | G6PD | GACCTACGGCAACAGATACA |
| 18280 | G6PD | TCGGAGCTGGACCTGACCTA |
| 18290 | G6PD | CAACCCCGAGGAGTCGGAGC |
| 18300 | G6PD | GTTCTTCAACCCCGAGGAGT |
| 18310 | G6PD | GGGCATGTTCTTCAACCCCG |
| 18320 | G6PD | AAGATGATGACCAAGAAGCC |
| 18330 | G6PD | CAAGATGATGACCAAGAAGC |
| 18340 | G6PD | GATCCGCGTGCAGCCCAACG |
| 18350 | G6PD | GCAGTGCAAGCGCAACGAGC |
| 18360 | G6PD | CTGCAGTTCCATGATGTGGC |
| 18370 | G6PD | GAGGCTGCAGTTCCATGATG |
| 18380 | G6PD | ACGAGCGCAAGGCCGAGGTG |
| 18390 | G6PD | CCTGAACGAGCGCAAGGCCG |
| 18400 | G6PD | CAAGGCCCTGAACGAGCGCA |
| 18410 | G6PD | CTTCATCCTGCGCTGCGGCA |
| 18420 | G6PD | GTGCCCTTCATCCTGCGCTG |
| 18430 | G6PD | AGAATGAGAGGTGGGATGGT |
| 18440 | G6PD | GTGGAGAATGAGAGGTGGGA |
| 18450 | KIF11 | CTTAATGAAACCATAAAAAT |
| 18460 | KIF11 | GACTAAGCTTAATTGCTTTC |
| 18470 | KIF11 | GCTTAATTGCTTTCTGGAAC |
| 18480 | KIF11 | TCTGGAACAGGATCTGAAAC |
| 18490 | KIF11 | CTGAAACTGGATATCCCAAC |
| 18500 | KIF11 | TTAAAGGTACGACACCACAG |
| 18510 | KIF11 | TTATTTATACCCATCAACAC |
| 18520 | KIF11 | ATCTCCTTGATCAGCTGAAA |
| 18530 | KIF11 | CAACAAAGAAGAGACAATTC |
| 18540 | KIF11 | TTAGGATGTGGATGTAGAAG |
| 18550 | KIF11 | GGATGTAGAAGAGGCAGTTC |
| 18560 | KIF11 | GATGTAGAAGAGGCAGTTCT |
| 18570 | KIF11 | ATGTAGAAGAGGCAGTTCTG |
| 18580 | KIF11 | CAAGAGCCATCTGTAGATGC |
| 18590 | KIF11 | GCCATCTGTAGATGCTGGTG |
| 18600 | KIF11 | GGTGTGGATTGTTCATCAAT |
| 18610 | KIF11 | GTGGATTGTTCATCAATTGG |
| 18620 | KIF11 | TGGATTGTTCATCAATTGGC |
| 18630 | KIF11 | GGATTGTTCATCAATTGGCG |
| 18640 | KIF11 | TGGCGGGGTTCCATTTTTCC |
| 18650 | KIF11 | CCACAGCATAAAAAATCACA |
| 18660 | KIF11 | GGAAAAGACAAAGAAAACAG |
| 18670 | KIF11 | AAACAGAGGCATTAACACAC |
| 18680 | KIF11 | GAGGCATTAACACACTGGAG |
| 18690 | KIF11 | CACACTGGAGAGGTCTAAAG |
| 18700 | KIF11 | GGAAGAAACTACAGAGCACT |
| 18710 | KIF11 | CTTAGTCAAACCAATTTTTA |
| 18720 | KIF11 | TCTCTTTTAAAGTACCTGTT |
| 18730 | KIF11 | TTCTCTTTTAAAGTACCTGT |
| 18740 | KIF11 | TATAAATAACTTTTCCTCTG |
| 18750 | KIF11 | CAGTTCTTACCAGTGTTGAT |
| 18760 | KIF11 | TCAGTTCTTACCAGTGTTGA |
| 18770 | KIF11 | TGATCAAGGAGATGTTCACG |
| 18780 | KIF11 | GTTTCCTTTTCAGCTGATCA |
| 18790 | KIF11 | TTTAGCATCATTAACAGCTC |
| 18800 | KIF11 | ACAGATGGCTCTTGACTTAG |
| 18810 | KIF11 | TCCACACCAGCATCTACAGA |
| 18820 | KIF11 | ATATGACATACCTGGAAAAA |
| 18830 | KIF11 | AGGTTGATCTGGGCTCGCAG |
| 18840 | KIF11 | AGTGAATTAAAGGTTGATCT |
| 18850 | KIF11 | AAGTGAATTAAAGGTTGATC |
| — | — | — |

### Example 18: Generating Edited iPSC Cells Using Cas12a and Testing Effect of Activin A on Pluripotency

[0669] To generate natural killer cells from pluripotent stem cells, a representative induced pluripotent stem cell (iPSC) line was generated and designated “PCS-201”. This line was generated by reprogramming adult male human primary dermal fibroblasts purchased from ATCC (ATCCR: PCS-201-012) using a commercially available non-modified RNA reprogramming kit (Stemgent/Reprocell, USA). The reprogramming kit contains non-modified reprogramming mRNAs (OCT4, SOX2, KLF4, cMYC, NANOG, and LIN28) with immune evasion mRNAs (E3, K3, and B18R) and double-stranded microRNAs (miRNAs) from the 302/367 clusters. Fibroblasts were seeded in fibroblast expansion medium (DMEM/F12 with 10% FBS). The next day, media was switched to Nutristem medium and daily overnight transfections were performed for 4 days (day 1 to 4). Primary iPSC colonies appeared on day 7 and were picked on day 10-14. Picked colonies were expanded clonally to achieve a sufficient number of cells to establish a master cell bank. The parental line chosen from this process and used for the subsequent experiments passed standard quality controls, including confirmation of stemness marker expression, normal karyotype and pluripotency.

[0670] To generate edited iPSC cells, the PCS-201 (PCS) cells were electroporated with a Cas 12a RNP designed to cut at the target gene of interest. Briefly, the cells were treated 24 hours prior to transfection with a ROCK inhibitor (Y27632). On the day of transfection, a single cell solution was generated using accutase and 500,000 PCS iPS cells were resuspended in the appropriate electroporation buffer and Cas 12a RNP at a final concentration of 2 μM. When two RNPs were added simultaneously, the total RNP concentration was 4 μM (2+2). This solution was electroporated using a Lonza 4D electroporator system. Following electroporation, the cells were plated in 6-well plates in mTESR media containing CloneR (Stemcell Technologies). The cells were allowed to grow for 3-5 days with daily media changes, and the CloneR was removed from the media by 48 hours post electroporation. To pick single colonies, the expanded cells were plated at a low density in 10 cm plates after resuspending them in a single cell suspension. Rock inhibitor was used to support the cells during single cell plating for 3-5 days post plating depending on the size of the colonies on the plate. After 7-10 days, sufficiently sized colonies with acceptable morphology were picked and plated into 24-well plates. The picked colonies were expanded to sufficient numbers to allow harvesting of genomic DNA for subsequent analysis and for cell line cryopreservation. Editing was confirmed by NGS and selected clones were expanded further and banked. Ultimately, karyotyping, stemness flow, and differentiation assays were performed on a subset of selected clones.

[0671] Two target genes of interest were CISH and TGFβRII, both of which were hypothesized to enhance natural killer cell function. As the TGFβ:TGFβRII pathway is believed to be involved in the maintenance of pluripotency, it was hypothesized that a functional deletion of TGFβRII in iPSCs could lead to differentiation and prevent generation of TGFβRII edited iPSCs. Due to the convergence of Activin receptor signaling and TGFβRII signaling in regulating SMAD2/3 and other intracellular molecules, it was hypothesized that Activin A could replace TGFβ in commercially available pluripotent stem cell medias to generate edited lines. To test this hypothesis, the pluripotency of unedited and TGFβRII edited iPSCs grown with Activin A was assessed. Several different culture medias were utilized: “E6” (Essential 6TM Medium, #A1516401, ThermoFisher), which lacks TGFβ, “E7”, which was E6 supplemented with 100 ng/ml of bFGF (Peprotech, #100-18B), “E8” (Essential 8™ Medium, #A1517001, ThermoFisher), and “E7+ActA”, which was E6 supplemented with 100 ng/ml of bFGF and varying concentrations of Activin A (Peprotech #120-14P). Typically, E6 and E7 medias are typically insufficient to maintain the stemness and pluripotency of PSCs over multiple passages in culture.

[0672] In order to determine whether Activin A could maintain PCS iPSCs in the absence of exogenous TGFβ, unedited PCS iPSCs were plated on a LaminStem™ 521 (Biological Industries) coated 6-well plate and cultured in E6, E7, E8 or E7+ActA (with Activin A at two different concentrations—1 ng/ml and 4 ng/ml). After 2 passages, the cells were assessed for morphology and stemness marker expression. Morphology was assessed using a standard phase contrast setting on an inverted microscope. Colonies with defined edges and non-differentiated cells typical of iPSC colonies, were deemed to be stem like. To confirm the morphological observations, the expression of standard iPS cell stemness markers was measured using intracellular flow cytometry. Briefly, cells were dissociated, stained for extracellular markers, and then fixed overnight and permeabilized using the reagents and standard protocol from the Foxp3/Transcription Factor Staining Buffer Set (eBioscience™). Cells were stained for flow cytometric analysis with anti-human TRA-1-60-R_AF®488 (Biolegend®: Clone TRA-1-60-R), anti-Human Nanog_AF®647 (BD Pharmingen™: Clone N31-355), and anti-Oct4 (Oct3)_PE (Biolegend®: Clone 3A2A20). Cells were recorded on a NovoCyte Quanteon Flow Cytometer (Agilent) and analyzed using FlowJo (FlowJo, LLC). As shown in FIG. 46, both 1 ng/ml and 4 ng/ml of Activin A was sufficient to maintain pluripotency with equivalent stemness marker expression to the cells grown in E8. As expected, cells grown in E6 and E7 (which lacked TGFβ) did not maintain stemness gene expression to the same degree as E8, indicating the loss of iPSC stemness in the absence of TGFβ or Activin A. These results suggest that Activin A can supplement iPSC stemness in the absence of TGFβ signaling.

[0673] Given the demonstration that Activin A could support iPSC stemness in the absence of TGFβ, TGFβRII knockout (“KO”) iPSCs, CISH KO iPSCs, and TGFβRII/CISH double knockout (“DKO”) iPSC lines were generated. Specifically, iPSCs were edited using an RNP having an engineered Cas12a with three amino acid substitutions (M537R, F870L, and H800A (SEQ ID NO: 62)) and a gRNA specific for CISH or TGFβRII. To make CISH/TGFβRII DKO iPSCs, iPSCs were treated with an RNP targeting CISH and an RNP targeting TGFβRII simultaneously. The particular guide RNA sequences of Table 26 were used for editing of CISH and TGFβRII. Both guides were generated with a targeting domain consisting of RNA, an AsCpf1 scaffold of the sequence UAAUUUCUACUCUUGUAGAU (SEQ ID NO: 1153) located 5′ of the targeting domain, and a 25-mer DNA extension of the sequence ATGTGTTTTTGTCAAAAGACCTTTT (SEQ ID NO: 1154) at the 5′ terminus of the scaffold sequence.

TABLE 26
Guide RNA sequences

| | gRNA | |
|---|---|---|
| | Targeting | |
| | Domain | |
| Target | Sequence | Full Length gRNA Sequence |
| CISH 7050 | GGUGUACA | ATGTGTTTTTGTCAAAAGACCTTTTrUrA |
| | GCAGUGGC | rArUrUrUrCrUrArCrUrCrUrUrGrUr |
| | UGGU | ArGrArUrGrGrUrGrUrArCrArGrCrA |
| | (SEQ ID | rGrUrGrGrCrUrGrGrU (SEQ ID |
| | NO: 1155) | NO: 1156) |
| TGFβRII | UGAUGUGA | ATGTGTTTTTGTCAAAAGACCTTTTrUrA |
| 24026 | GAUUUUC | rArUrUrUrCrUrArCrUrCrUrUrGrUr |
| | CACCU | ArGrArUrUrGrArUrGrUrGrArGrArU |
| | (SEQ ID | rUrUrUrCrCrArCrCrU (SEQ ID |
| | NO: 1157) | NO: 1158) |

[0674] The edited clones were generated as described above with a minor modification for the cells treated with TGFβRII RNPs. Briefly, TGFβRII-edited PCS iPSCs and TGFβRII/CISH edited PCS iPSCs were plated after electroporation at the 6-well stage in the mTESR supplemented with 10 ng/ml of Activin A in order to support the generation of edited clones. The cells were cultured with 10 ng/ml of Activin A through the cell colony picking and early expansion stages. Colonies assessed as having the correct single KO (CISH KO or TGFβRII KO) or double KO (CISH/TGFβRII DKO) were picked and expanded (clonal selection).

[0675] To determine the optimal concentration of Activin A for culturing of TGFβRII KO and TGFβRII/CISH DKO iPSCs, a slightly expanded concentration curve was tested as shown FIG. 41. Similar to the assessment performed previously, the iPSCs were cultured in a Matrigel-treated 6-well plate with concentrations of 1 ng/ml, 2 ng/ml, 4 ng/ml and 10 ng/ml Activin A. As shown in FIG. 41, TGFβRII KO or CISH/TGFβRII DKO cells cultured in E7 medium supplemented with 4 ng/mL Activin A for 19 days (over 5 passages) maintained a wild type morphology. FIG. 42 shows the morphology of TGFβRII KO PCS-201 hiPSC Clone 9.

[0676] As shown in FIG. 43A, the initial editing efficiency of the iPSCs treated simultaneously with the CISH and TGFβRII RNPs (prior to clonal selection) was high, with 95% of the CISH alleles edited and 78% of the TGFβRII alleles edited. Unedited iPSC controls did not have indels at either loci. iPSCs that were treated with CISH or TGFβRII RNPs individually showed 93% and 82% editing rates prior to clone selection (depicted in FIG. 43A). The KO cell lines (CISH KO iPSCs, TGFβRII KO iPSCs, and CISH/TGFβRII DKO iPSCs) were subsequently assessed for the presence of pluripotency markers Oct4, SSEA4, Nanog, and Tra-1-60 after culturing in the presence of supplemental Activin A. As shown in FIGS. 43B and 44, culturing the KO cell lines in Activin A maintained expression of these pluripotency markers.

[0677] The KO iPSC lines cultured in Activin A were next assessed for their capacity to differentiate using the STEMdiff™ Trilineage Differentiation Kit assay (from STEMCELL Technologies Inc., Vancouver, BC, CA) as depicted schematically in FIG. 45. As shown in FIG. 46A, culturing the single KO (TGFβRII KO iPSCs or CISH KO iPSCs) and DKO (TGFβRII/CISH DKO iPSCs) cell lines in media with supplemental Activin A maintained their ability to differentiate into early progenitors of all 3 germ layers, as shown by expression of ectoderm (OTX2), mesoderm (brachyury), and endoderm (GATA4) markers (FIG. 46A). The unedited PCS control cells were also able to express each of these markers.

[0678] The edited iPSCs were next karyotyped to determine whether the Cas12a editing caused large genetic abnormalities, such as translocations. As shown in FIG. 46B, the cells had normal karyotypes with no translocation between the cut sites.

[0679] To further support the results described above, an expanded Activin A concentration curve was performed on the unedited parental PSC line, an edited TGFβRII KO iPSC clone (C7), and an additional representative (unedited) cell line designated RUCDR (RUCDR Infinite Biologics group, Piscaway NJ). At the outset, the iPSCs were seeded at 1e5 cells per well in a 1× LaminStem™ 521 (Biological Industries) coated 12-well plate. Cells were then passaged 10 times over ˜40-50 days using 0.5 mM EDTA in 1×PBS dissociation and Y-27632 (Biological Industries) until wells achieved >75% confluency. Cells were cultured in Essential 6TM Medium (Gibco), TeSR™-E7™, and TeSR™-E8™ (StemCell Technologies) for controls and titrated using TeSR™-E7™ supplemented with E, coli-derived recombinant human/murine/rat Activin A (PeproTech) spanning a 4-log concentration dosage (0.001-10 ng/ml). Following 5 and 10 passages, cells were dissociated and then fixed overnight and permeabilized using the reagents and standard protocol from the Foxp3/Transcription Factor Staining Buffer Set (eBioscience™). Cells were stained for flow cytometric analysis with anti-human TRA-1-60-R_AF®488 (Biolegend®; Clone TRA-1-60-R), anti Sox2_PerCP-Cy™5.5 (BD Pharmingen™: Clone 030-678), anti Human Nanog_AF®647 (BD Pharmingen™; Clone N31-355), anti-Oct4 (Oct3)_PE (Biolegend R: Clone 3A2A20), and anti-human SSEA-4_PE/Dazzle™ 594 (Biolegend®; Clone MC-813-70). Cells were recorded on a NovoCyte Quanteon Flow Cytometer (Agilent) and analyzed using FlowJo (FlowJo, LLC). FIG. 46C shows the titration curves for the tested iPSC lines. The minimum concentration of Activin A required to maintain each line varied slightly, with the TGFβRII KO iPSCs requiring a higher baseline amount of Activin A as compared to the parental control (0.5 ng/ml vs 0.1 ng/ml). In all 3 cell lines, 4 ng/ml was well above the minimum amount of Activin A necessary to maintain stemness marker expression over an extended culture period. FIG. 46D shows the stemness marker expression in the cells culture with the base medias alone (no Activin A). As expected, the TGFβRII KO iPSCs did not maintain expression, while the two unedited lines were able to maintain stemness marker expression in E8.

### Example 19: Differentiation of Edited CISH KO, TGFβRII KO, and CISH/TGFβRII DKO iPSCs into iNK Cells Exhibiting Enhanced Function

[0680] FIG. 47A depicts a schematic of an exemplary workflow for development of a CRISPR-Cas12a-edited iPSC platform for generation of enhanced CD56+ iNK cells. As shown in FIG. 47A. the CISH and TGFβRII genes are targeted in iPSCs via delivery of RNPs to the cells using electroporation to generate CISH/TGFβRII DKO iPSCs. iPSCs with the desired edits at both the CISH and TGFβRII genes can then be selected and expanded to create a master iPSC bank. Edited cells from the iPSC master bank can then be differentiated into CD56+ CISH/TGFβRII DKO iNK cells.

[0681] FIGS. 47B and 47C depict two exemplary schematics of the process of differentiating iPSCs into iNK cells. As shown in FIGS. 47B and 47C. edited cells (or unedited control cells) were differentiated using a two-phase process. First, in the “hematopoietic differentiation phase.” hiPSCs (edited and unedited) were cultured in StemDiff™ APEL2TM medium (StemCell Technologies) with SCF (40 ng/mL). BMP4 (20) ng/ml), and VEGF (20 ng/ml) from days 0-10, to produce spin embryoid bodies (SEBs). As shown in FIG. 53B, SEBs were then cultured from days 11-39 in StemDiff™ APEL2™ medium comprising IL-3 (5 ng/mL, only present for the first week of culture), IL-7 (20) ng/mL), IL-15 (10 ng/mL), SCF (20 ng/ml), and Flt3L (10 ng/ml) in an NK cell differentiation phase, CISH KO iPSCs, TGFβRII KO iPSCs, CISH/TGFβRII DKO iPSCs, and unedited wild-type iPSC lines (PCS), were differentiated into iNKs according to the schematic in FIG. 47B, and then characterized to assess whether they exhibited a phenotype congruent with NK cells (see FIGS. 48, 49, and 50A), CISH KO iPSCs, TGFβRII KO iPSCs, CISH/TGFβRII DKO iPSCs, and unedited wild-type iPSC lines, described in FIGS. 50B, 50C, 51B, 51C, and 52 were also differentiated into iNKs utilizing the alternative method shown in FIG. 47C, and then characterized to assess whether they exhibited a phenotype congruent with NK cells (see FIGS. 50B, 50C, 51B, 51C, and 52).

[0682] Specifically, the CISH KO INKs, TGFβRII KO INKs, CISH/TGFβRII DKO iNKs were assessed for exemplary phenotypic markers of (i) stem cells (CD34); and (ii) hematopoietic cells (CD43 and CD45) by flow cytometry. Briefly, two rows of embryoid bodies from a 96-well plate for each genotype were harvested for staining. Once a single cell solution was generated using Trypsin and mechanical disruption, the cells were stained for the human markers CD34, CD45, CD31, CD43, CD235a and CD41. As shown in FIG. 48, CISH KO INKs, TGFβRII KO INKs, CISH/TGFβRII DKO iNKs, and iNKs derived from wild-type parental clones (PCS) exhibited lower levels of CD34 relative to control cells, which were purified CD34+ HSCs. CD34 expression levels were similar across these iNK cell clones indicating that editing of the iPSCs did not affect differentiation to the CD34+ stage. FIG. 49 shows that CISH KO iNKs, TGFβRII KO INKs, CISH/TGFβRII DKO INKs, and iNKs derived from wild-type parental clones (PCS) exhibited similar surface expression profiles for CD43 and CD45. Thus, iNKs differentiated from edited and unedited iPSCs exhibited similar levels of markers for stem cells and hematopoietic cells, and both differentiated edited and unedited cells exhibited certain NK cell phenotypes based on marker expression profiles.

[0683] CISH KO INKs, TGFβRII KO INKs, CISH/TGFβRII DKO iNKs, iNKs derived from wild-type parental clones (WT), and NK cells derived from peripheral blood (PBNKs) were further assayed to determine their surface expression of CD56, a marker for NK cells. Briefly, cells were harvested on day 39 of differentiation, washed and resuspended in a flow staining buffer containing antibodies that recognize human CD56, CD16, NKp80, NKG2A, NKG2D, CD335, CD336, CD337, CD94, CD158. Cells events were recorded on a NovoCyte Quanteon Flow Cytometer (Agilent) and analyzed using FlowJo (FlowJo, LLC). FIG. 50A shows that iNK cells derived from edited iPSCs exhibited similar CD56+ surface expression relative to iNK cells derived from unedited iPSC parental clones and PBNK cells (at day 39 in culture). FIG. 50B shows that iNK cells derived from edited iPSCs exhibited similar CD56+ and CD16+ surface expression relative to iNKs derived from unedited iPSC parental clones (at day 39 in culture). FIG. 50C shows that iNK cells derived from edited iPSCs exhibited similar CD56+, CD54+, KIR+, CD16+, CD94+, NKG2A+, NKG2D+, NCR1+, NCR2+, and NCR3+ surface expression relative to iNKs derived from unedited iPSC parental clones and PBNK cells (at day 39 in culture)

[0684] To confirm cell functionality, cells were assessed using a tumor cell cytotoxicity assay on the xCelligence platform. Briefly, tumor targets, SK-OV-3 tumor cells, were plated and grown to an optimal cell density in 96-well xCelligence plates. iNKs were then added to the tumor targets at different E:T ratios (1:4, 1:2, 1:1, 2:1. 4:1 and 8:1) in the presence of TGFβ. FIG. 51C shows that TGFβRII KO and CISH/TGFβRII DKO cells more effectively killed SK-OV-3 cells, as measured by percent cytolysis, relative to unedited iNK cells either in the presence or absence of TGF-β (at E:T ratios of 1:4, 1:2, 1:1, and 2:1).

[0685] While iNK cells generated using the alternative method described in FIG. 47B were CD56+ and capable of killing tumor targets in an in vitro cytotoxicity assay, the iNKs did not express many of the canonical markers associated with mature NK cells such as CD16, NKG2A, and KIRs. A K562 feeder cell line is typically used to expand and mature iNKs that are generated by similar differentiation methodologies. After expansion on feeders, the iNKs often express CD16, KIRs and other surface markers indicative of a more mature phenotype. In order to identify a feeder free approach to achieve more mature iNKs with enhanced functionality, an alternative media composition was tested for the stage of differentiation between day 11 and day 39. Instead of culturing cells between day 11 and day 39 in APEL2 (as shown in FIG. 47B), the spin embryoid bodies (SEBs) were cultured in NK MACSR media (MACS Miltenyi Biotec) with 15% human AB serum in the presence of the same cytokines as mentioned above. This protocol is depicted in FIG. 47C. In order to compare the two media compositions, Day 11 SEBs from WT PCS, TGFβRII KO iPSCs, CISH KO iPSCs, and DKO iPSCs were split into two conditions for the second half of the differentiation process, one with APEL2 base and the other with the NKMACS+serum base. At day 39, the cell yield, marker expression, and cytotoxicity levels were assessed. In all cases, the NKMACS+serum condition (depicted in FIG. 47C) outperformed the APEL2 condition (depicted in FIG. 47B). FIG. 47D shows that the NKMACS+serum condition yielded a greater fold expansion at the end of the 39 day process (nearly 300 fold expansion vs 100 fold expansion). When NK marker expression was analyzed by flow cytometry as described above, the iNKs cultured in NKMACS+serum were 34% CD16 positive and exhibited 20% KIR expression while the APEL2 conditions yielded cells that were essentially negative for both markers. This was the case for all genotypes tested. In order to visualize the markers relative to time or condition, flow cytometry data was gated and analyzed in FlowJo and heat maps were constructed (FIGS. 47E and 47F). Samples were first cleaned by gating for live cells (FSC-H vs. LIVE/DEAD™ Fixable Yellow) followed by immune cells (SSC-A vs. FSC-A), singlets (FSC-H vs. FSC-A) and the natural killer cell population (CD56 vs. CD45). The NK population, defined as CD45+56+ cells, was gated and each marker was analyzed along the X-axis in an analysis synonymous to a histogram/count plot (CD16+, CD94+, NKG2A+, NKG2D+, CD335+, CD336+, CD337+, NKp80+, panKIR+). Statistics for the aforementioned markers are visualized with a double-gradient heat map (GraphPad Prism 8) with the key set to the following parameters: black=0), medium intensity 30<x<50), maximum intensity=100. Based on this analysis, the expression kinetics and magnitude across all genotypes were improved by the NKMACS+serum condition. The cells were also assessed in a tumor cell cytotoxicity assay as described previously. The iNKs generated in the NKMACS+serum conditions were capable of killing at a lower E:T ratio than the cells differentiated in APEL2, indicating that the improved NK maturation had a positive impact on the functionality of the cells (FIG. 47G).

[0686] Analysis of additional differentiation markers in NKMACS+serum confirmed the presence of CD16 expression. FIG. 50B shows analysis of specific subpopulations (CD45 vs CD56 and CD56 vs CD16) derived from unedited or DKO iPSCs. Additionally, the cell surface marker profile of unedited iNK cells and CISH/TGFβRII DKO iNKs in FIG. 50C confirmed that the NK cell marker profile of the edited iNK cells was similar to that of unedited iNK cells. Taken together, these data show that Cas12a-edited single and double KO iPSC clones differentiate into iNK cells in a similar fashion as unedited iPSC clones, as defined by NK cell markers.

[0687] Additionally, certain edited iNK clonal cells (CISH single knockout “CISH_C2, C4, C5, and C8”, TGFβRII single knockout “TGFβRII-C7”, and TGFβRII/CISH double knockout “DKO-C1”), and parental clone iNK cells (“WT”) were cultured in the presence of 1 ng/ml or 10 ng/ml IL-15, and differentiation markers were assessed at day 25, day 32, and day 39 post-hiPSC differentiation. As shown in FIG. 53, surface expression phenotypes (measured as a percentage of the population) culturing in 10 ng/mL IL-15 resulted in a higher proportion of surface expression in the single knockouts, double knockouts, and the parental clonal line.

[0688] The edited iNK cells differentiated in NK MACS R: medium+serum conditions were assessed for effector function in vitro using a range of molecular and functional analyses. First, a phosphoflow cytometry assay was performed to determine the phosphorylated state of STAT3 (pSTAT3) and SMAD2/3 (pSMAD2/3) in the day 39 iNK cells, CISH KO iNKs exhibited increased pSTAT3 upon IL-15 stimulation (FIG. 50D), and CISH/TGFβRII DKO iNKs exhibited decreased pSMAD2/3 levels upon TGF-β stimulation as compared to unedited iNK cells (FIG. 50E). These data suggest that CISH/TGFβRII DKO iNKs have enhanced sensitivity to IL-15 and resistance to TGF-β mediated immunosuppression. In addition, CISH/TGFβRII DKO iNKs were characterized for IFNγ and TNFα production using a phorbol myristate acetate and Ionomycin (PMA/IMN) stimulation assay. Briefly, cells were treated with 2 ng/ml of PMA and 0.125 μM of Ionomycin along with a protein transport inhibitor for 4 hours. The cells were harvested and stained using a standard intracellular staining protocol. The CISH/TGFβRII DKO INKs produced significantly higher amounts of IFNγ and TFNα when stimulated with PMA/IMN (FIGS. 50F and 50G), providing evidence of enhanced cytokine production following stimulation relative to unedited control iNKs.

[0689] To test iNK tumor cell killing activity, a 3D solid tumor cell killing assay (depicted schematically in FIG. 51A) was utilized. In brief, spheroids were formed by seeding 5,000 NucLight Red labeled SK-OV-3 cells in 96 well ultra-low attachment plates. Spheroids were incubated at 37° ° C. before addition of effector cells (at different E:T ratios) and 10 ng/ml TGF-β, spheroids were subsequently imaged every 2 hours using the Incucyte S3 system for up to 120 hours. Data shown are normalized to the red object intensity at time of effector addition. Normalization of spheroid curves maintains the same efficacy patterns observed in non-normalized data. Using this assay, the cytotoxicity of iNKs differentiated from four CISH KO iPSC clones, two TGFβRII KO iPSC clones and one CISH/TGFβRII DKO iPSC clone were compared to control iNKs derived from the unedited parental iPSCs. As shown in FIG. 51B, edited iNK cells were capable of reducing the size of SK-OV-3 spheroids more effectively than unedited iNK control cells (averaged data from 6 assays). In particular the CISH/TGFβRII DKO iNK cells reduced the size of SK-OV-3 spheroids to a greater extent than unedited iNK cells at all E:T ratios greater than 0.01, and significantly at E:T ratios of 1 or higher. The TGFβRII KO clone 7 iNKs also exhibited significantly enhanced killing when compared to unedited iNK cells. While a number of single CISH KO clones did not show significant enhancement of killing at the 10:1 E:T ratio, the majority of clones did display a trend towards increased SK-OV-3 spheroid cell killing, with the greatest differential at the highest ET ratio. To further elucidate the functionality of the edited iNKs, the cells were pushed to kill tumor targets repeatedly over a multiday period, herein described as an in vitro serial killing assay. At day 0 of the assay, 10×10⁶ Nalm6 tumor cells (a B cell leukemia cell line) and 2×10⁵ iNKs were plated in each well of a 96-well plate in the presence of IL-15 (10 ng/ml) and TGF-β (10 ng/ml). At 48 hour intervals, a bolus of 5×10³ Nalm6 tumor cells (a B cell leukemia cell line) was added to re-challenge the iNK population. As shown in FIG. 52, the edited iNK cells (CISH/TGFβRII DKO INK cells) exhibited continued killing of Nalm6 cells after multiple challenges with Nalm6 tumor cells, whereas unedited iNK cells were limited in their serial killing effect. The data supports the conclusion that the CISH and TGFβRII edits result in prolonged enhancement of cell killing.

[0690] Finally, edited iNK cells (CISH/TGFβRII DKO INK cells) were assayed for their ability to kill tumor targets in an in vivo model. To this end, an established NOD scid gamma (NSG) xenograft model was utilized in an assay as depicted in FIG. 54A. Briefly. 1×10⁶ SK-OV-3 cells engineered to express luciferase were injected intraperitoneally (IP) at day 0). On day 3, the inoculated mice were imaged using an In vivo imaging system (IVIS) and randomized into 3 groups. The next day (day 4), 20×10⁶ unedited iNKs or CISH/TGFβRII DKO iNKs were administered by IP injection, while a third group was injected with vehicle as a control. Following inoculation of the animals with tumor cells, animals were imaged once a week to measure tumor burden over time. FIG. 54B depicts the bioluminescence of the tumors in the individual mice in the 3 different groups (n=9 in each group), vehicle, unedited iNKs, and CISH/TGFβRII DKO iNKs. The average tumor burden over time for these same animals is depicted in FIG. 54C. A two way anova analysis was performed on the data, and CISH/TGFβRII DKO iNK treated animals had significantly less tumor burden as measured by bioluminescence when compared to animals treated with unedited iNKs (p value: 0.0004). By 10 days post-tumor implantation, mice injected with the CISH/TGFβRII DKO iNKs exhibited a significant reduction in the size of their tumors relative to mice injected with the vehicle controls or the unedited iNKs. The overall reduction in tumor size is seen for several days, and at least until 35 days post-tumor implantation. These data show that the edited DKO iNKs were actively killing tumor cells in this in vivo model.

[0691] Overall, these results demonstrate that unedited and CISH/TGFβRII DKO iPSCs can be differentiated into iNK cells exhibiting canonical NK cell markers. Additionally, CISH/TGFβRII DKO iNK cells demonstrated enhanced anti-tumor activity against tumor cell lines derived from both solid and hematological malignancies.

### Example 20: ADORA2A Edited iPSCs Give Rise to Edited iNKs with Enhanced Function

[0692] ADORA2A is another target gene of interest, the loss of which is hypothesized to affect NK cell function in a tumor microenvironment (TME). The ADORA2A gene encodes a receptor that responds to adenosine in the TME, resulting in the production of cAMP which functions to drive a number of inhibitory effects on NK cells. We hypothesized that knocking out the function of ADORA2A could enhance iNK cell function. Utilizing a similar approach to the one described in Examples 18 and 19, the PCS iPSC line was edited using a RNP having an engineered Cas 12a with three amino acid substitutions (M537R, F870L, and H800A (SEQ ID NO: 62)) and a gRNA specific to ADORA2A (except that 4 μM RNP was delivered to cells rather than 2 μM RNP). As described in Example 18, the gRNA was generated with a targeting domain consisting of RNA, an AsCpf1 scaffold of the sequence UAAUUUCUACUCUUGUAGAU (SEQ ID NO: 1153) located 5′ of the targeting domain, and a 25-mer DNA extension of the sequence ATGTGTTTTTGTCAAAAGACCTTTT (SEQ ID NO: 1154) at the 5′ terminus of the scaffold sequence. The ADORA2A gRNA sequence is shown in Table 27.

TABLE 27
Guide RNA sequence

| | gRNA | |
|---|---|---|
| | Targeting | |
| | Domain | |
| Target | Sequence | Full Length gRNA Sequence |
| ADORA2A | CCAUCGGC | ATGTGTTTTTGTCAAAAGACCTTTTrUrA |
| 4113 | CUGACUCC | rArUrUrUrCrUrArCrUrCrUrUrGrUr |
| | CAUG | ArGrArUrCrCrArUrCrGrGrCrCrUrG |
| | (SEQ ID | rArCrUrCrCrCrArUrG (SEQ ID |
| | NO: 1159) | NO: 1160) |

[0693] The bulk editing rate by the Cas12a RNP prior to clonal selection was 49% as determined by next-generation sequencing (NGS). Nonetheless, several clones that had both ADORA2A alleles edited were identified, expanded and differentiated. To determine whether an ADORA2A edited iPSC could yield CD45+CD56+ iNKs, both bulk and singled ADORA2A KO clones were differentiated using the NKMACS+serum protocol as described in Example 19 (FIG. 47C). As shown in FIG. 55A, edited iPSCs differentiated to iNKs with similar NK cell marker expression compared to unedited control iPSCs.

[0694] To confirm that Cas 12a-mediated ADORA2A editing resulted in a functional deletion of the gene, cAMP accumulation in response to treatment with 5′-N-ethylcarboxamide adenosine (“NECA”, a more stable adenosine analog that acts as an ADORA2A agonist) was assessed in both the edited and unedited control iNKs. Edited cells with a functional knockout of ADORA2A would not be expected to accumulate as much CAMP in the cells in response to NECA relative to cells with functional ADORA2A. Briefly, iNK cells were treated with varying concentrations of NECA for 15 minutes. The iNK cells were then lysed, and the CAMP in the lysate was then measured using a CisBio CAMP kit. As shown in FIG. 55B, unedited iNKs had increased levels of cAMP accumulation as the concentration of NECA was increased (n=2). Conversely, the ADORA2A (“A2A KOs”) KO iNKs showed minimal production of cAMP at increasing concentrations of NECA, indicating that the Cas12a-induced edits functionally knocked out ADORA2A function. The bulk iNKs (top two A2A KO iNK lines in FIG. 55B) exhibited slightly higher levels of cAMP than the selected ADORA2A KO clones (lower four A2A KO iNK lines in FIG. 55B), as would be expected from the lower editing rates in the bulk population. Based on this molecular evidence of functional ablation of ADORA2A, the iNKs would be expected to be resistant to the inhibitory effects of adenosine in a tumor microenvironment.

[0695] The ADORA2A KO iNKs were also tested in an in vitro NALM6 serial killing assay as described in Example 19, with one main difference: 100 μM of NECA was added in place of TGFβ. The ADORA2A KO iNKs exhibited enhanced serial killing relative to the wild type iNKs in the presence of NECA, indicating that the ADORA2A KO iNKs were resistant to NECA inhibition (FIG. 55C). As a result, the ADORA2A KO iNK cells would be expected to have improved cytotoxicity against tumor cells in the presence of adenosine in the TME relative to unedited iNK cells.

### Example 21: Generation of CISH/TGFβRII/ADORA2A Triple Edited (TKO) iPSCs and the Characterization of Differentiated TKO iNKs

[0696] In order to generate CISH, TGFβRII, and ADORA2A triple edited (TKO) iPSCs, two approaches were taken: 1) two step editing in which the CISH/TGFβRII DKO (CR) iPSC clone described in Examples 18 and 19 was edited at the ADORA2A locus via electroporation with an ADORA2A targeting RNP (as described in Example 20), and 2) simultaneous editing of PCS iPS cells with all 3 RNPs, one for each target gene. Both strategies utilized the editing protocol briefly described in Example 18. In the case of simultaneous editing, the total RNP concentration was 8 μM (Cish:2 μM+TGFβRII:2 μM+ADORA2A:4 μM). Regardless of the approach, cells were plated, expanded and colonies were picked as described above. Using NGS to analyze gDNA harvested from the iPSCs, it was determined that the bulk editing rates were 96.70%, 97.17%, and 90.16% for CISH, TGFβRII and ADORA2A, respectively, when all target genes were edited simultaneously. Picked colonies that had Insertions and/or Deletions (InDels) at all 6 alleles were selected for further analysis.

[0697] Similar to the analysis described in Example 18, unedited iPSCs and the edited iPSCs were differentiated to iNKs using the NK MACS+Serum condition (described in FIG. 49C) and assessed by flow cytometry at different time points, including at day 25, day 32, and day 39 in culture. As shown in FIG. 56A, analysis of the different NK surface markers revealed no major differences between clones that were generated by the two-step editing method (CR+A 8) or the simultaneous editing method (CRA 6). Both TKO clones (CR+A 8 and CRA 6) showed similar expression profiles to the unedited iNKs (Wt) at each time point. When the TKO iNK cells were analyzed for their responsiveness to NECA (as described in Example 20), both TKO iNKs had little to no cAMP accumulation (FIG. 56B), demonstrating that ADORA2A was functionally knocked out. By contrast, the unedited iNKs demonstrated a NECA dose dependent increase in cAMP (FIG. 56B). These results indicate that the TKO iNKs would be expected to be resistant to the inhibitory effects of adenosine in the TME. Finally, the CISH/TGFβRII/ADORA2A TKO iNKs were assessed alongside CISH/TGFβRII DKO INKs, ADORA2A single KO (SKO) iNKs, and unedited iNKs in a 3D tumor cell killing assay. This assay was performed as described in Example 19 with IL-15 and TGFβ but without NECA. Interestingly, both the TKO (CRA6) and DKO (CR) iNKs outperformed the unedited iNKs in killing the tumor cells, indicating that both multiplex edited iNKs have enhanced function over unedited control cells (FIG. 56C). These results show that knocking out ADORA2A does not negatively affect the ability of iNKs having CISH and TGFβRII KOs to kill tumor spheroid cells.

### Example 22: Selection of CISH, TGFβRII, ADORA2A, TIGIT, and NKG2A Targeting gRNAs

[0698] The cutting efficiency of CISH, TGFβRII, ADORA2A, TIGIT, and NKG2A Cas 12a guide RNAs were further tested. Guide RNAs were screened by complexing commercially synthesized gRNAs with Cas 12a in vitro and delivering gRNA/Cas12a ribonucleoprotein (RNP) to IPSCs via electroporation. The iPSCs were edited using a RNP having an engineered Cas12a with three amino acid substitutions (M537R, F870L, and H800A (SEQ ID NO: 62)). The gRNAs were generated with a targeting domain consisting of RNA, an AsCpf1 scaffold of the sequence UAAUUUCUACUCUUGUAGAU (SEQ ID NO: 1153) located 5′ of the targeting domain, and a 25-mer DNA extension of the sequence ATGTGTTTTTGTCAAAAGACCTTTT (SEQ ID NO: 1154) at the 5′ terminus of the scaffold sequence. Table 28 provides the targeting domains of the guide RNAs that were tested for editing activity.

TABLE 28
guide RNA sequences

| | gRNA Targeting |
|---|---|
| Target | Domain Sequence |
| TGFβRII | UGAUGUGAGAUUUUCCACCUG |
| | (SEQ ID NO: 1161) |
| CISH | ACUGACAGCGUGAACAGGUAG |
| | (SEQ ID NO: 1162) |
| ADORA2A | CCAUCGGCCUGACUCCCAUGC |
| | (SEQ ID NO: 1163) |
| ADORA2A | CCAUCACCAUCAGCACCGGGU |
| | (SEQ ID NO: 1164) |
| ADORA2A | CCUGUGUGCUGGUGCCCCUGC |
| | (SEQ ID NO: 1165) |
| TIGIT | UGCAGAGAAAGGUGGCUCUAU |
| | (SEQ ID NO: 1166) |
| TIGIT | UCUGCAGAAAUGUUCCCCGUU |
| | (SEQ ID NO: 1167) |
| TIGIT | UAGGACCUCCAGGAAGAUUCU |
| | (SEQ ID NO: 1168) |
| NKG2A | GCAACUGAACAGGAAAUAACC |
| | (SEQ ID NO: 1169) |
| NKG2A | GUUGCUGCCUCUUUGGGUUUG |
| | (SEQ ID NO: 1170) |
| NKG2A | AAGGGAAUGACAAAACCUAUC |
| | (SEQ ID NO: 1171) |

[0699] In brief, 100,000 iPSCs/well were transfected with the RNP of interest, cells were incubated at 37ºC for 72 hours, and then harvested for DNA characterization. iPSCs were transfected with gRNA/Cas12a RNPs at various concentrations. The percentage editing events were determined for eight different RNP concentrations ranging from negative control (0 mM) to 8 mM.

[0700] As shown in FIG. 57 panel 1, the TGFβRII gRNA (SEQ ID NO: 1161) exhibited an EC50 of ˜79 nM RNP. As shown in FIG. 57 panel 2, the CISH gRNA (SEQ ID NO: 1162) exhibited an EC50 of ˜50 nM RNP. As shown in FIG. 57 panel 3, an ADORA2A gRNA (SEQ ID NO: 1163) included in RNP2960 exhibited an EC50 of ˜63 nM RNP, while an ADORA2A gRNA (SEQ ID NO: 1164) included in RNP3109, or gRNA (SEQ ID NO: 1165) included in RNP3108 exhibited EC50 values of ˜493 nM and ˜280 nM RNP respectively. As shown in FIG. 57 panel 4, a TIGIT gRNA (SEQ ID NO: 1166) included in RNP2892 exhibited an EC50 of ˜29 nM RNP, while a TIGIT gRNA (SEQ ID NO: 1167) included in RNP3106, or gRNA (SEQ ID NO: 167) included in RNP3107 exhibited EC50 values of ˜1146 nM and ˜40 nM RNP respectively. As shown in FIG. 57 panel 5, a NKG2A gRNA (SEQ ID NO: 1169) included in RNP19142 exhibited an EC50 of ˜8 nM RNP, while a NKG2A gRNA (SEQ ID NO: 1170) included in RNP3069, or gRNA (SEQ ID NO: 1171) included in RNP2891 exhibited EC50 values of ˜12 nM and ˜13 nM RNP respectively.

### Example 23: Knock-In of Cargo at Essential Gene Loci in T-Cells Using a Viral Vector

[0701] The present example describes gene editing of populations of T cells using viral vector transduction. Following editing, cells were subjected to various assays such as flow cytometry, ddPCR, next-generation sequencing, or functional tumor killing assays to determine KO/KI efficiency and/or efficacy.

[0702] T cells were thawed in a bead bath as known in the art and were removed from the bath on day two. Cells were electroporated on day four after thawing. Briefly, 250,000 T cells per well in a Lonza 96-well cuvette were suspended in buffer P2 and electroporated with RNP comprising gRNA RSQ22337 (SEQ ID NO: 95) and Cas 12a (SEQ ID NO: 62) targeting the GAPDH gene (1 μM RNP) or with media control, using various pulse codes. Appropriate media was added to cells immediately after electroporation and cells were allowed to recover for 15 minutes. AAV6 viral particles comprising a donor plasmid construct containing a knock-in cassette with a cargo of GFP, CD19 CAR, B2M-HLA-E, or vector control were then added to T cells at varying multiplicity of infection (MOI) concentrations (1E4, 1E5, or 1 E6 MOI (vg/cell)). The donor plasmids were designed as described in Example 2, with a 5′ codon-optimized coding portion of GAPDH exon 9 optimized to prevent further binding of the gRNA targeting domain sequence of the guide RNA (RSQ22337)), an in-frame sequence encoding the P2A self-cleaving peptide (“P2A”), an in-frame coding sequence for a cargo sequence (e.g., GFP, CD19 CAR, or B2M-HLA-E) (“Cargo”), a stop codon and polyA signal sequence. T cells were split two days later, and then every 48 hours until they were analyzed by flow cytometry or otherwise utilized. T cells were sorted using flow cytometry seven days post electroporation to determine successful transduction, transformation, editing, knock-in cassette integration, and/or expression events. A very high percentage (94.8%) of cells expressed GFP, indicating that a high proportion of cells had GFP integrated at the GAPDH gene in the edited T cell population, and these edited cells exhibited similar viability and ability to expand as control cells that underwent mock transformation (FIG. 17B-17C). Moreover, GFP knock-in at the GAPDH locus generated GFP+ cells at a significantly greater rate than GFP knock-in at the TRAC locus (FIG. 17D). This increase in GFP+ cells produced by GFP knock-in at the GAPDH locus compared to GFP knock-in at the TRAC locus was observed across a range of AAV6 concentrations (FIG. 17E). These results demonstrate that knock-in at an essential gene locus (e.g., GAPDH) can achieve greater knock-in efficiency, including at lower concentrations of the AAV6 donor template, than knock-in at the TRAC locus. A very high percentage (95.8%) of cells expressed CD19 CAR, indicating that a high proportion of cells had CD19 CAR integrated at the GAPDH gene in the edited T cell population, and these edited cells also exhibited similar viability and ability to expand as control cells that underwent mock transformation (FIGS. 58A-58C, and 58H). Additionally, a very high percentage (over 80%) of cells expressed B2M-HLA-E, indicating that a high proportion of cells had B2M-HLA-E integrated at the GAPDH gene in the edited T cell population. As shown in FIG. 58H, T cells that were edited to include knock-in of GFP, CD19 CAR, or B2M-HLA-E expressed these transgenes at rates that were greater than 80%. Furthermore, B2M-HLA-E KI cells expressed a higher level of HLA-E when compared to control cells and were viable (see FIG. 59).

[0703] The knock-in efficiencies generated using the methods described herein were compared to the knock-in efficiencies generated using optimized methods known in the art for targeting cargo knock-ins to non-essential genes. In brief, T cell populations were transduced with AAV6 vector comprising a donor template suitable for knock-in of GFP at the GAPDH gene as described herein, and were transformed with gRNA RSQ22337 (SEQ ID NO: 95) and Cas 12a (SEQ ID NO: 62) as described above. Alternatively, T cell populations were subjected to highly optimized GFP knock-in at the TRAC locus using AAV6 vector transduction (see e.g., Vakulskas et al. A high-fidelity Cas9 mutant delivered as a ribonucleoprotein complex enables efficient gene editing in human hematopoietic stem and progenitor cells. Nat Med. 2018:24(8): 1216-1224). Flow cytometry was utilized to measure knock-in efficiency (determined by percentage of T cell population expressing GFP, measured 7 days post-electroporation). Knock-in rates at the TRAC locus were high (˜50%) when compared to publicly described integration frequencies for similar methodologies: however, knock-in efficiency at the GAPDH gene using the methods described herein were significantly (p=<0.001 using unpaired t-test) higher (˜90%) (see FIG. 17D). The same RNP concentration, AAV6 MOI, and homology arm lengths were utilized in both experiments, averaged results from three independent replicates are shown. Thus, the methods described herein can be used to isolate a population of modified cells, such as immune cells like T cells, that more highly express a gene of interest relative to other gene knock-in methods.

[0704] In other experiments, T cells were edited to generate TRAC knock-out cells without (see FIG. 58D) or with (see FIG. 58E) a CD19 CAR KI at the GAPDH locus using the methods described above. As shown in FIG. 58E, a very high percentage of edited cells expressed CD19 CAR (87.6%) indicating high levels of CD19 CAR integration at the GAPDH gene. By contrast, the control TRAC KO cells did not express CD19 CAR (FIG. 58D). As shown in FIG. 58F. T cells transformed with TRAC targeting RNPs, GAPDH targeting RNPs, and/or transduced with AAV6 comprising a CD19 cargo targeted for knock-in at GAPDH displayed various phenotypes representative of their respective desired edited genotypes. As determined by flow cytometry. T cells that had CD19 CAR KI were observed at rates greater than 90% when cells were transformed with GAPDH targeting RNPs, and transduced with AAV6 comprising a knock-in CD19 cargo targeting GAPDH. T cells that had TRAC KO and CD19 CAR KI were observed at rates greater than 80% when cells were transformed with TRAC targeting RNPs, GAPDH targeting RNPs, and transduced with AAV6 comprising a CD19 cargo targeted for knock-in at GAPDH. As depicted in FIG. 58I, T cells with CD19 CAR KI at GAPDH were able to destroy hematological cancer cells (CD19+Raji cells) at rates significantly greater than T cells with GFP KI at GAPDH (“Cells only” refers to unedited T cells). Furthermore, T cells with CD19 CAR KI at GAPDH demonstrated significantly greater cytotoxicity against Raji cells than either T cells with GFP KI at GAPDH or unedited T cells as seen in FIG. 58J. This significant increase in cytotoxicity was also observed with T cells with CD19 CAR KI at GAPDH in combination with TRAC and/or TGFBR2 KO (FIG. 58J).

[0705] In other experiments, a population of T cells were edited to generate KO of TRAC, KO of TGFBR2, and CD19 CAR KI at the GAPDH locus using the methods described above, thereby generating triple mutant (TRAC KO, TGFBR2 KO, and CD19 CAR KI) T cells at a high efficiency. A high percentage of the edited T cells (about 73.6%) expressed CD19 CAR (see FIG. 58G).

[0706] As shown in FIG. 60A, highly defined engineered T cells comprising multiple edits can be generated using a one-step electroporation and transformation process in which three RNPs targeting three loci (TRAC, B2M and GAPDH) and an AAV comprising a GFP cargo for knock-in at the GAPDH locus are applied to the T cells (FIG. 60A left panel), or using a sequential electroporation and transformation process in which the same RNPs and AAVs are sequentially applied to the T cells (FIG. 60A right panel). The one-step process generated about the same percentage of cells containing TRAC and B2M knockouts and GFP expression as the sequential process. In addition. T cells were edited to generate multiple knock-outs including at the TRAC locus, B2M locus, CIITA locus, and TGFBR2 locus as well as a GFP cargo knock-in at the GAPDH locus using a one-step process wherein five Cas 12a (SEQ ID NO:62) RNPs (specific to TRAC, B2M, CIITA, TGFBR2, and GAPDH) and an AAV6 comprising a GFP cargo designed to integrate within the GAPDH locus were applied to the cells at once (see FIG. 60B). Each individual editing event occurred within greater than 80% of the total population, while cells that at least comprised three mutations (TRAC KO, B2M KO, and GFP cargo KI at the GAPDH locus) occurred at a rate greater than 80%.

[0707] These results show that the methods described herein can produce highly engineered T cell populations with high levels of editing homogeneity for potential use as autologous and/or allogeneic T cell therapies suitable for targeting a variety of tumors and/or cancerous cells.

### Example 24: Knock-In of Cargo at Essential Gene Loci in NK Cells Using a Viral Vector

[0708] The present example describes gene editing of populations of NK cells using viral vector transduction.

[0709] NK cells were thawed in a bead bath as known in the art and were removed from the bath on day two. Cells were electroporated on day four after thawing. Briefly, 500,000 NK cells per well in a Lonza 96-well cuvette were suspended in buffer P2 and electroporated with RNP comprising gRNA RSQ22337 (SEQ ID NO: 95) and Cas 12a (SEQ ID NO: 62) targeting the GAPDH gene (1 μM RNP) or media control, using various pulse codes. Appropriate media was added to cells immediately after electroporation and cells were allowed to recover for 15 minutes. AAV6 viral particles comprising a donor plasmid construct containing a knock-in cassette with a cargo of GFP, CD19 CAR, or vector control were then added to NK cells at varying multiplicity of infection (MOI) concentrations (1E4, 1E5, or 1E6 MOI (vg/cell)). The donor plasmids were designed as described in Example 2, with a 5′ codon-optimized coding portion of GAPDH exon 9 optimized to prevent further binding of the gRNA targeting domain sequence of the guide RNA (RSQ22337)), an in-frame sequence encoding the P2A self-cleaving peptide (“P2A”), an in-frame coding sequence for a cargo sequence (e.g., GFP, or CD19 CAR) (“Cargo”), a stop codon and polyA signal sequence. Media was changed 24 hours post electroporation and IL15 was added. Media was changed again at 72 hours post electroporation, cells were split and 10 ng/ml IL15 was added. NK cells were then split every 48 hours until they were analyzed by flow cytometry or otherwise utilized. NK cells were sorted using flow cytometry seven days post electroporation to determine successful transduction, transformation, editing, knock-in cassette integration, and/or expression events. A very high percentage of cells expressed GFP (86.6%), indicating that a high proportion of edited cells had GFP integrated at the GAPDH gene in the edited NK cell population when compared to a population of control NK cell population that was not transfected with an RNP targeting GAPDH (FIGS. 61A and 61B). Additionally, a very high percentage of cells expressed CD19 CAR, indicating that a high proportion of edited cells had CD19 CAR integrated at the GAPDH gene in the edited NK cell population when compared to a control NK cell population that was not transfected with an RNP targeting GAPDH (FIG. 61C-61D). The methods described herein produced populations of edited NK cells with knock-in of GFP or CD19 CAR at rates greater than 80% (see FIG. 61E). As depicted in FIG. 61F. NK cells with CD19 CAR KI at GAPDH were able to effectively destroy Raji cells at rates significantly greater than unedited NK cells. Furthermore. NK cells with CD19 CAR KI at GAPDH also demonstrated significantly greater cytotoxicity against Nalm6 cells than NK cells with GFP KI at GAPDH (FIG. 61G). These results show that the methods described herein can produce engineered NK cell populations with high levels of editing homogeneity for potential use as autologous and/or allogeneic NK cell therapies suitable for targeting a variety of tumors and/or cancerous cells.

### Example 25: Knock-Out of CISH and TGFβRII in Combination with Knock-In of Bicistronic CD16 and mbIL-15 Sequences at an Essential Gene Locus

[0710] mbIL-15/CD16 double knock-in (DKI)/CISH/TGFβRII double knock-out (DKO) iPSCs were generated using methods described in Examples 14 and 19. In brief, the CISH/TGFβRII DKO was generated using RNPs having an engineered Cas 12a (SEQ ID NO: 62) and a gRNA specific for either CISH or TGFβRII having sequences shown in Table 26. Plasmid PLA1834 was used to generate the mbIL-15/CD16 (CD16^{+/+}/mbIL-15^{+/+}) DKI, as described in Example 14. Following confirmation of the DKI/DKO genotype using standard sequencing methods known in the art, colonies of DKI/DKO iPSCs were propagated and cell populations were then differentiated to iNK cells using a spin embryoid method. As expected. DKI/DKO iNK cells displayed significantly greater CD16 and IL-15Rα expression as compared to unedited (WT) iNK cells (FIG. 65A).

[0711] In an in vitro persistence assay, mbIL-15/CD16 (CD16^{+/+}/mbIL-15^{+/+}) DKI/CISH/TGFβRII DKO iNK cells maintained a stable cell number across at least 15 days in the absence of exogenous cytokine support (FIG. 62A). Unedited (WT) iNK cells displayed a substantial decrease in cell number over the same time period. As shown in FIG. 65D. DKI/DKO iNK cells displayed stable viability across at least 16 days without exogenous cytokine support, while WT iNK cells displayed a substantial decrease in culture viability over the same time period. Additionally, the DKI/DKO iNK cells showed comparable total live cell count across at least 15 days without exogenous cytokines as compared to mbIL-15/CD16 (CD16^{+/+}/mbIL-15^{+/+}) DKI iNK cells (FIG. 62B). Thus, mbIL-15/CD16 (CD16^{+/+}/mbIL-15^{+/+}) DKI/CISH/TGFβRII DKO iNK cells demonstrated increased cytokine-independent persistence across at least 15 or 16 days as compared to unedited (WT) iNK cells and similar persistence across this time period as mbIL-15/CD16 (CD16^{+/+}/mbIL-15^{+/+}) DKI iNK cells.

[0712] Tumor cell killing ability of the mbIL-15/CD16 (CD16^{+/+}/mbIL-15^{+/+}) DKI/CISH/TGFβRII DKO (DKI/DKO) iNK cells was evaluated in a number of in vitro tumor cell killing assays. Detroit-562 (pharyngeal carcinoma), FaDu (pharyngeal carcinoma), HT-29 (colorectal adenocarcinoma), or HCT116 (colorectal carcinoma) cells were seeded into Xcelligence plates (ACEA #5232376001) at 10,000 cells per well and incubated overnight (˜20 hours). DKI/DKO iNK cells were added at various Effector: Target (E:T) ratios. For the 1:1 E:T condition, 10 μg/mL anti-EGFR antibody cetuximab (CTX) was also included. Cytolysis, as measured by electrical impedance, was assayed according to the manufacturer's (Xcelligence) protocol. Results are shown in FIGS. 63A-D (average±standard deviation: N=3). As depicted, for target Detroit-562, FaDu, HT-29, or HCT116 cells, DKI/DKO iNK cells at 5:1 and 10:1 E:T ratios resulted in significant cytolysis. Additionally, for target HCT117 cells, DKI/DKO iNK cells at a 1:1 E:T ratio also resulted in significant cytolysis. Moreover, for Detroit-562, FaDu, or HCT116 cells, DKI/DKO iNK cells at a 1:1 E:T ratio in combination with cetuximab resulted in significant cytolysis, with the resulting cytolysis greater than the combined effect observed for DKI/DKO iNK cells at a 1:1 E:T ratio alone or cetuximab alone.

[0713] Further tumor cell killing assays were conducted with the mbIL-15/CD16 (CD16^{+/+}/mbIL-15^{+/+}) DKI/CISH/TGFβRII DKO (DKI/DKO) iNK cells. Again, HT-29 (colorectal adenocarcinoma) cells were seeded into Xcelligence plates (ACEA #5232376001) at 10,000 cells per well and incubated overnight. DKI/DKO iNK cells or unedited (WT) iNK cells were then added at a 10:1 E:T ratio. Cytolysis, as measured by electrical impedance, was assayed according to the manufacturer's (Xcelligence) protocol. Results are shown in FIG. 64A (average±standard deviation: N=3). As depicted, both DKI/DKO and WT iNK cells resulted in significant cytolysis. In vitro persistence of mbIL-15/CD16 (CD16^{+/+}/mbIL-15^{+/+}) DKI/CISH/TGFβRII DKO (DKI/DKO) iNK cells and unedited (WT) iNK cells was also examined using HT-29 cells. DKI/DKO iNK cells and WT iNK cells were co-cultured with HT-29 cells for 4 days at a 10:1 E:T ratio. FIG. 64B depicts viability and CD16 expression, as measured by flow cytometry, at day 4. As depicted, WT iNK cells largely did not survive after killing HT-29 cells, whereas DKI/DKO cells persisted. Additionally, whereas surviving WT iNK cells were <1% CD16+, surviving DKI/DKO iNK cells were >80% CD16+. This in vitro persistence assay was repeated at a 1:1 E:T ratio. As shown in FIG. 64C, the DKI/DKO cells again demonstrated greater persistence and maintenance CD16 expression following exposure to tumor (HT-29) cells.

[0714] Testing of the mbIL-15/CD16 (CD16^{+/+}/mbIL-15^{+/+}) DKI/CISH/TGFβRII DKO (DKI/DKO) iNK cells in a 3D solid tumor killing assay was also conducted similarly to the depiction in FIG. 20. Briefly, spheroids were formed by seeding 5,000 NucLight Red labeled SK-OV-3 cells in 96 well ultra-low attachment plates. Spheroids were incubated at 37° C. before addition of mbIL-15/CD16 (CD16^{+/+}/mbIL-15^{+/+}) DKI/CISH/TGFβRII DKO (DKI/DKO) iNK cells at various E:T ratios. Spheroids were subsequently imaged every 2 hours using the Incucyte S3 system for up to 4 days. Data were normalized to the red object intensity at time of effector addition. Results are shown in FIG. 65B (N=1; 2 technical replicates per cell line). As depicted, edited DKI/DKO iNK cells were capable of reducing the size of SK-OV-3 spheroids more effectively than unedited (WT) iNK cells. Further 3D tumor killing assays were conducted similarly to the above using DKI/DKO iNK cells or WT iNK cells in combination with 10 μg/ml trastuzumab or IgG (as a control) (FIG. 65C). Potency was determined as IC50, indicating the E:T ratio required to reduce the SK-OV-3 spheroids by 50% after 100 hours of killing. As depicted in FIG. 65C, edited DKI/DKO iNK cells reduced the size of SK-OV-3 spheroids more effectively than unedited (WT) iNK cells, both with and without trastuzumab. The results seen in combination with trastuzumab suggest that DKI/DKO iNK cells mediate enhanced antibody-dependent cellular cytotoxicity (ADCC) relative to WT iNK cells.

[0715] A phosphoflow cytometry assay was performed to determine the phosphorylated state of SMAD2/3 (pSMAD2/3) in mbIL-15/CD16 (CD16^{+/+}/mbIL-15^{+/+}) DKI/CISH/TGFβRII DKO (DKI/DKO) iNK cells. Briefly, DKI/DKO iNKs were plated the day before in a cytokine starved condition. The next day, the cells were stimulated with 10 ng/ml of TGFβ for a set length of time (e.g., 0)-60) minutes). The cells were fixed immediately at the end of the time point and stained. The cells were processed on a NovoCyte Quanteon and the data was analyzed in FlowJo. Results are shown in FIG. 65E (data represents 1 independent experiment). SMAD2/3 phosphorylation in DKI/DKO iNK cells was unchanged in the presence of TGFβ, while TGFβ increased SMAD2/3 phosphorylation in unedited (WT) iNK cells. Additionally, a 3D solid tumor cell killing assay was performed, similarly as described above, using mbIL-15/CD16 (CD16^{+/+}/mbIL-15^{+/+}) DKI/CISH/TGFβRII DKO (DKI/DKO) iNK cells at an E:T ratio of 31.6 and with or without 10 ng/ml TGFβ. As shown in FIG. 65F, DKI/DKO iNK cells were capable of reducing the size of SK-OV-3 spheroids more effectively than unedited iNK control cells after 100 hrs of killing (data represents 1 independent experiment). Moreover, DKI/DKO iNK cell activity was unaffected by the presence of exogenous TGFβ, in contrast to unedited (WT) iNKs. mbIL-15/CD16 (CD16^{+/+}/mbIL-15^{+/+}) DKI/CISH/TGFβRII DKO (DKI/DKO) iNK cells were also pushed to kill tumor targets repeatedly over a multiday period in an in vitro serial killing assay. At day 0 of the assay, 10×10³ Nalm6 tumor cells (a B cell leukemia cell line) and 2×10⁵ DKI/DKO iNKs were plated in each well of a 96-well plate in the presence of TGFβ (10 ng/ml). At 48 hour intervals, a bolus of 5×10³ Nalm6 tumor cells was added to re-challenge the DKI/DKO iNK population. Results are shown in FIG. 65G (N=1; 3 technical replicates per cell line: error bars=standard deviation). As depicted, the DKI/DKO iNK cells exhibited continued killing of Nalm6 tumor cells after multiple challenges with Nalm6 tumor cells, even in the presence of TGFβ. In contrast, unedited (WT) iNK cells were limited in their serial killing effect. Taken all together, these data suggest that DKI/DKO iNKs have enhanced resistance to TGFβ-mediated immunosuppression.

[0716] Testing of the mbIL-15/CD16 (CD16^{+/+}/mbIL-15^{+/+}) DKI/CISH/TGFβRII DKO (DKI/DKO) iNK cells in an in vivo mouse model was conducted as depicted in FIG. 66A. Mice were intravenously (IV) inoculated with 0.125×10⁶ SKOV3-luc cells. Following 19 days to allow for establishment of the tumors, mice were imaged using an in vivo imaging system (IVIS) to establish pre-treatment (day −2) tumor burden and then randomized into treatment groups. On day 0, mice were injected intravenously with (i) 2.5 mpk trastuzumab, or (ii) 20×10⁶ DKI/DKO iNK cells and 2.5 mpk trastuzumab. Following day 0), the mice were imaged using an IVIS to assess tumor burden over time. The tumor burden over time as measured by bioluminescent imaging (BLI) via IVIS is depicted in FIGS. 66B-66C. Tumor burden is displayed in FIG. 66B, and representative bioluminescent imaging of the mice at various time points is displayed in FIG. 66C. As depicted, mice treated with DKI/DKO iNK cells in combination with trastuzumab exhibited greater tumor reduction than mice treated with trastuzumab alone. Mice treated with DKI/DKO iNK cells in combination with trastuzumab exhibited significant tumor reduction after just 5 days. Furthermore, treatment with the DKI/DKO iNK cells in combination with trastuzumab led to complete tumor clearance in all of the animals in the treatment group at day 5.

[0717] Additional testing of the mbIL-15/CD16 (CD16^{+/+}/mbIL-15^{+/+}) DKI/CISH/TGFβRII DKO (DKI/DKO) iNK cells in an in vivo mouse model was conducted as depicted in FIG. 67A. Mice were intraperitoneally inoculated with 0.25×10⁶ SKOV3-luc cells. Following 4 days to allow for establishment of the tumors, mice were imaged using an in vivo imaging system (IVIS) to establish pre-treatment (day −1) tumor burden and then randomized into treatment groups. After 1 additional day (on day 0), mice were injected intraperitoneally (IP) with 5×10⁶ unedited (WT) iNK cells, 5×10⁶ DKI/DKO iNK cells, or no iNK cells for trastuzumab-alone or the isotype control. Some treatment groups (“Trastuzumab×3” or “+Tras.×3”) received IP injections of 2.5 mpk trastuzumab on days 0, 7, and 14. Following day 0), the mice were imaged weekly using an IVIS to assess tumor burden over time. The tumor burden over time as measured by bioluminescent imaging (BLI) via IVIS is depicted in FIGS. 67B-C. Representative bioluminescent imaging of the mice at various time points is displayed in FIG. 67E. As seen in FIG. 67B, treatment with the unedited (WT) iNK cells or the DKI/DKO iNK cells alone did not lead to tumor reduction in vivo. However, mice treated with iNK cells in combination with trastuzumab exhibited greater tumor reduction than mice treated with trastuzumab alone (FIG. 67C). Mice dosed with mbIL-15/CD16 (CD16^{+/+}/mbIL-15^{+/+}) DKI/CISH/TGFβRII DKO (DKI/DKO) iNK cells in combination with trastuzumab (DKI/DKO+Tras×3) also had significantly prolonged survival compared to mice dosed with unedited (WT) iNK cells in combination with trastuzumab (WT+Tras×3) or trastuzumab alone (FIG. 67D). Moreover, the reduction in tumor burden was greater in mice treated with DKI/DKO iNK cells than in mice treated with unedited (WT) iNK cells. Mice treated with DKI/DKO iNK cells in combination with trastuzumab exhibited significant tumor reduction after just 6 days (FIG. 67E). Furthermore, as shown in FIG. 67E, treatment with the DKI/DKO iNK cells in combination with trastuzumab led to complete tumor clearance in two (40%) of the animals in the treatment group at day 31 post-introduction of the NK cells. These results confirm that mbIL-15/CD16 (CD16^{+/+}/mbIL-15^{+/+}) DKI/CISH/TGFβRII DKO iNK cells readily kill tumor cells in vivo and demonstrate that mbIL-15/CD16 (CD16^{+/+}/mbIL-15^{+/+}) DKI/CISH/TGFβRII DKO iNK cells in combination with trastuzumab produces greater in vivo tumor reduction than treatment with either trastuzumab alone or with unedited (WT) iNK cells in combination with trastuzumab.

### EQUIVALENTS

[0718] It is to be understood that while the disclosure has been described in conjunction with the detailed description thereof, the foregoing description is intended to illustrate and not limit the scope of the present disclosure, which is defined by the scope of the appended claims. Other aspects, advantages, and modifications are within the scope of the following claims.

The application's sequence listing, which the Patent Office published only in electronic form, follows.

SEQUENCE LISTING (19033 sequences)

SEQ ID NO: 1 - DNA, 555 bp, Artificial Sequence
  Description of Artificial Sequence: Synthetic polynucleotide
gaagactgtggatggcccctccgggaaactgtggcgtgatggccgcggggctctccagaacatcatccctgcctctactggcgctgccaaggctgtgggcaaggtcatccctgagctgaacgggaagctcactggcatggccttccgtgtccccactgccaacgtgtcagtggtggacctgacctgccgtctagaaaaacctgccaaatatgatgacatcaagaaggtggtgaagcaggcgtcggagggccccctcaagggcatcctgggctacactgagcaccaggtggtctcctctgacttcaacagcgacacccactcctccacctttgacgctggggctggcattgccctcaacgaccactttgtcaagctcatttcctggtatgtggctggggccagagactggctcttaaaaagtgcagggtctggcgccctctggtggctggctcagaaaaagggccctgacaactctttacatcttctaggtatgacaacgagttcggatatagcaatagagtggtcgatctgatggctcatatggctagcaaagag

SEQ ID NO: 2 - DNA, 621 bp, Artificial Sequence
  Description of Artificial Sequence: Synthetic polynucleotide
gaagactgtggatggcccctccgggaaactgtggcgtgatggccgcggggctctccagaacatcatccctgcctctactggcgctgccaaggctgtgggcaaggtcatccctgagctgaacgggaagctcactggcatggccttccgtgtccccactgccaacgtgtcagtggtggacctgacctgccgtctagaaaaacctgccaaatatgatgacatcaagaaggtggtgaagcaggcgtcggagggccccctcaagggcatcctgggctacactgagcaccaggtggtctcctctgacttcaacagcgacacccactcctccacctttgacgctggggctggcattgccctcaacgaccactttgtcaagctcatttcctggtatgtggctggggccagagactggctcttaaaaagtgcagggtctggcgccctctggtggctggctcagaaaaagggccctgacaactctttacatcttctaggtatgacaacgagttcggatatagcaatagagtggtcgatctgatggctcatatggctagcaaagagggaagcggagctactaacttcagcctgctgaagcaggctggagacgtggaggagaaccctggacct

SEQ ID NO: 3 - DNA, 567 bp, Artificial Sequence
  Description of Artificial Sequence: Synthetic polynucleotide
ggctttcccataatttcctttcaaggtggggagggaggtagaggggtgatgtggggagtacgctgcagggcctcactccttttgcagaccacagtccatgccatcactgccacccagaagactgtggatggcccctccgggaaactgtggcgtgatggccgcggggctctccagaacatcatccctgcctctactggcgctgccaaggctgtgggcaaggtcatccctgagctgaacgggaagctcactggcatggccttccgtgtccccactgccaacgtgtcagtggtggacctgacctgccgtctagaaaaacctgccaaatatgatgacatcaagaaggtggtgaagcaggcgtcggagggccccctcaagggcatcctgggctacactgagcaccaggtggtctcctctgacttcaacagcgacacccactcctccacctttgacgctggggctggcattgccctcaacgaccactttgtcaagctcatctcttggtacgacaatgagttcggatatagcaatagagtggtcgatctgatggctcatatggctagcaaagag

SEQ ID NO: 4 - DNA, 500 bp, Artificial Sequence
  Description of Artificial Sequence: Synthetic polynucleotide
atttggctacagcaacagggtggtggacctcatggcccacatggcctccaaggagtaagacccctggaccaccagccccagcaagagcacaagaggaagagagagaccctcactgctggggagtccctgccacactcagtcccccaccacactgaatctcccctcctcacagttgccatgtagaccccttgaagaggggaggggcctagggagccgcaccttgtcatgtaccatcaataaagtaccctgtgctcaaccagttacttgtcctgtcttattctagggtctggggcagaggggagggaagctgggcttgtgtcaaggtgagacattcttgctggggagggacctggtatgttctcctcagactgagggtagggcctccaaacagccttgcttgcttcgagaaccatttgcttcccgctcagacgtcttgagtgctacaggaagctggcaccactacttcagagaacaaggccttttcctctcctcgctccagt

SEQ ID NO: 5 - DNA, 500 bp, Artificial Sequence
  Description of Artificial Sequence: Synthetic polynucleotide
agactggctcttaaaaagtgcagggtctggcgccctctggtggctggctcagaaaaagggccctgacaactcttttcatcttctaggtatgacaacgaatttggctacagcaacagggtggtggacctcatggcccacatggcctccaaggagtaagacccctggaccaccagccccagcaagagcacaagaggaagagagagaccctcactgctggggagtccctgccacactcagtcccccaccacactgaatctcccctcctcacagttgccatgtagaccccttgaagaggggaggggcctagggagccgcaccttgtcatgtaccatcaataaagtaccctgtgctcaaccagttacttgtcctgtcttattctagggtctggggcagaggggagggaagctgggcttgtgtcaaggtgagacattcttgctggggagggacctggtatgttctcctcagactgagggtagggcctccaaacagccttgcttgct

SEQ ID NO: 6 - DNA, 562 bp, Artificial Sequence
  Description of Artificial Sequence: Synthetic polynucleotide
gcagacttccatttacagtgaggaggtgagcattgcattgaacaaaagatggcgttttcacttggaattagttatctgaagctttaggattcctcagcaatatgattatgagacaagaaaggaagattcagaaatgagtctagttgaaggcagcaattcagagaagaagattcagttgttatcattgccgtcctgcttggtttatggcctggttcaggaccaaggagagaagtgtgaatacatgcctcttgagctatagaatgagacgctggagtcactaagatgattttttaaaagtattgttttataaacaaaaataagattgtgacaagggattccactattaatgttttcatgcctgtgccttaatctgactgggtatggtgagaattgtgcttgcagctttaaggtaagaattttaccatcttaatatgttaagaagtgccatttcagtctctcatctctactccaacttgtcttcttaggtgctaaagtcagagccgaaatctacgaggccttcgagaacatctaccccatcctgaagggcttcagaaagaccacc

SEQ ID NO: 7 - DNA, 580 bp, Artificial Sequence
  Description of Artificial Sequence: Synthetic polynucleotide
ctgaccacagctctgcaagcagacttccatttacagtgaggaggtgagcattgcattgaacaaaagatggcgttttcacttggaattagttatctgaagctttaggattcctcagcaatatgattatgagacaagaaaggaagattcagaaatgagtctagttgaaggcagcaattcagagaagaagattcagttgttatcattgccgtcctgcttggtttatggcctggttcaggaccaaggagagaagtgtgaatacatgcctcttgagctatagaatgagacgctggagtcactaagatgattttttaaaagtattgttttataaacaaaaataagattgtgacaagggattccactattaatgttttcatgcctgtgccttaatctgactgggtatggtgagaattgtgcttgcagctttaaggtaagaattttaccatcttaatatgttaagaagtgccatttcagtctctcatctctactccaacttgtcttcttaggggctaaagtgcgggccgagatctacgaggccttcgagaatatctaccccatcctgaagggcttcagaaagaccacc

SEQ ID NO: 8 - DNA, 521 bp, Artificial Sequence
  Description of Artificial Sequence: Synthetic polynucleotide
acaaaagatggcgttttcacttggaattagttatctgaagctttaggattcctcagcaatatgattatgagacaagaaaggaagattcagaaatgagtctagttgaaggcagcaattcagagaagaagattcagttgttatcattgccgtcctgcttggtttatggcctggttcaggaccaaggagagaagtgtgaatacatgcctcttgagctatagaatgagacgctggagtcactaagatgattttttaaaagtattgttttataaacaaaaataagattgtgacaagggattccactattaatgttttcatgcctgtgccttaatctgactgggtatggtgagaattgtgcttgcagctttaaggtaagaattttaccatcttaatatgttaagaagtgccatttcagtctctcatctctactccaacttgtcttcttaggtgctaaagtcagagcagaaatttatgaagcattcgagaacatctaccctattctaaagggattcaggaagacgacg

SEQ ID NO: 9 - DNA, 500 bp, Artificial Sequence
  Description of Artificial Sequence: Synthetic polynucleotide
cagaaatttatgaagcatttgaaaacatctaccctattctaaagggattcaggaagacgacgtaatggctctcatgtacccttgcctcccccacccccttctttttttttttttaaacaaatcagtttgttttggtacctttaaatggtggtgttgtgagaagatggatgttgagttgcagggtgtggcaccaggtgatgcccttctgtaagtgcccaccgcgggatgccgggaaggggcattatttgtgcactgagaacaccgcgcagcgtgactgtgagttgctcataccgtgctgctatctgggcagcgctgcccatttatttatatgtagattttaaacactgctgttgacaagttggtttgagggagaaaactttaagtgttaaagccacctctataattgattggactttttaattttaatgtttttccccatgaaccacagtttttatatttctaccagaaaagtaaaaatcttttttaaaagtgttgttttt

SEQ ID NO: 10 - DNA, 500 bp, Artificial Sequence
  Description of Artificial Sequence: Synthetic polynucleotide
taggtgctaaagtcagagcagaaatttatgaagcatttgaaaacatctaccctattctaaagggattcaggaagacgacgtaatggctctcatgtacccttgcctcccccacccccttctttttttttttttaaacaaatcagtttgttttggtacctttaaatggtggtgttgtgagaagatggatgttgagttgcagggtgtggcaccaggtgatgcccttctgtaagtgcccaccgcgggatgccgggaaggggcattatttgtgcactgagaacaccgcgcagcgtgactgtgagttgctcataccgtgctgctatctgggcagcgctgcccatttatttatatgtagattttaaacactgctgttgacaagttggtttgagggagaaaactttaagtgttaaagccacctctataattgattggactttttaattttaatgtttttccccatgaaccacagtttttatatttctaccagaaaagtaaaaatcttt

SEQ ID NO: 11 - DNA, 500 bp, Artificial Sequence
  Description of Artificial Sequence: Synthetic polynucleotide
aagggattcaggaagacgacgtaatggctctcatgtacccttgcctcccccacccccttctttttttttttttaaacaaatcagtttgttttggtacctttaaatggtggtgttgtgagaagatggatgttgagttgcagggtgtggcaccaggtgatgcccttctgtaagtgcccaccgcgggatgccgggaaggggcattatttgtgcactgagaacaccgcgcagcgtgactgtgagttgctcataccgtgctgctatctgggcagcgctgcccatttatttatatgtagattttaaacactgctgttgacaagttggtttgagggagaaaactttaagtgttaaagccacctctataattgattggactttttaattttaatgtttttccccatgaaccacagtttttatatttctaccagaaaagtaaaaatcttttttaaaagtgttgtttttctaatttataactcctaggggttatttctgtgccagacaca

SEQ ID NO: 12 - DNA, 522 bp, Artificial Sequence
  Description of Artificial Sequence: Synthetic polynucleotide
ggcccgggggactccacatggtggcaggcagtggcatcagcaagacactctctccctcacagaacgtgaagctccctgacgcctatgagcgcctcatcctggacgtcttctgcgggagccagatgcacttcgtgcgcaggtgaggcccagctgccggcccctgcatacctgtgggctatggggtggcctttgccctccctccctgtgtgccaccggcctcccaagccataccatgtcccctcagcgacgagctccgtgaggcctggcgtattttcaccccactgctgcaccagattgagctggagaagcccaagcccatcccctatatttatggcaggtgaggaaagggtgggggctggggacagagcccagcgggcaggggcggggtgagggtggagctacctcatgcctctcctccacccgtcactctccagccgaggccccacggaggcagacgagctgatgaagagagtgggcttccagtacgagggaacctacaaatgggtcaaccctcacaagctg

SEQ ID NO: 13 - DNA, 500 bp, Artificial Sequence
  Description of Artificial Sequence: Synthetic polynucleotide
gtgggtgaacccccacaagctctgagccctgggcacccacctccacccccgccacggccaccctccttcccgccgcccgaccccgagtcgggaggactccgggaccattgacctcagctgcacattcctggccccgggctctggccaccctggcccgcccctcgctgctgctactacccgagcccagctacattcctcagctgccaagcactcgagaccatcctggcccctccagaccctgcctgagcccaggagctgagtcacctcctccactcactccagcccaacagaaggaaggaggagggcgcccattcgtctgtcccagagcttattggccactgggtctcactcctgagtggggccagggtgggagggagggacgagggggaggaaaggggcgagcacccacgtgagagaatctgcctgtggccttgcccgccagcctcagtgccacttgacattccttgtcaccagcaacatctcgagccccctggatgtcc

SEQ ID NO: 14 - DNA, 587 bp, Artificial Sequence
  Description of Artificial Sequence: Synthetic polynucleotide
ccagggggctgtagtggggccaggctggacctctgtgccctgagcatggctttcttgtttttcagttttggaactccccaaagagctgtcagaaatctttgatcccacacgaggtaggctgctgcattcctccctgaggctaggggtaagggacacagctcattgggtcctatggctgttttcttgcccttttgaggaccttgttgtggcgcttatggtaactggggcaaagggtgaagttcctgatgggcaggtggggttccctttcctgggctttggtgggtggagaggtgggagctggaatgttagtaactgagctccctccattcccagagtgcatgagctcggagctgctggaggagttgatgtcctcagaaggtgggtggccctggaaggtgggagtgggtgtgggcaggggttgggctgctgctaggggagccctggcccagggcctgagactagtgctctctgcagtgttcgcccctctgctgagactttctcctcctcctggcgaccacgactacatctacaacctggacgagagcgagggcgtgtgcgacctgtttgatgtgcccgtgctgaacctg

SEQ ID NO: 15 - DNA, 568 bp, Artificial Sequence
  Description of Artificial Sequence: Synthetic polynucleotide
ccaggctggacctctgtgccctgagcatggctttcttgtttttcagttttggaactccccaaagagctgtcagaaatctttgatcccacacgaggtaggctgctgcattcctccctgaggctaggggtaagggacacagctcattgggtcctatggctgttttcttgcccttttgaggaccttgttgtggcgcttatggtaactggggcaaagggtgaagttcctgatgggcaggtggggttccctttcctgggctttggtgggtggagaggtgggagctggaatgttagtaactgagctccctccattcccagagtgcatgagctcggagctgctggaggagttgatgtcctcagaaggtgggtggccctggaaggtgggagtgggtgtgggcaggggttgggctgctgctaggggagccctggcccagggcctgagactagtgctctctgcagtgtttgcccctctgcttcgtcttagtcctcctccgggcgaccacgactacatctacaacctggacgagagcgagggcgtgtgcgacctgtttgatgtgcccgtgctgaacctg

SEQ ID NO: 16 - DNA, 500 bp, Artificial Sequence
  Description of Artificial Sequence: Synthetic polynucleotide
gtcagaaatctttgatcccacacgaggtaggctgctgcattcctccctgaggctaggggtaagggacacagctcattgggtcctatggctgttttcttgcccttttgaggaccttgttgtggcgcttatggtaactggggcaaagggtgaagttcctgatgggcaggtggggttccctttcctgggctttggtgggtggagaggtgggagctggaatgttagtaactgagctccctccattcccagagtgcatgagctcggagctgctggaggagttgatgtcctcagaaggtgggtggccctggaaggtgggagtgggtgtgggcaggggttgggctgctgctaggggagccctggcccagggcctgagactagtgctctctgcagtgtttgcccctctgcttcgtctttctccacccccgggagaccacgattatatctacaacctggacgagagtgaaggtgtctgtgacctcttcgacgtgcccgtgctcaacctc

SEQ ID NO: 17 - DNA, 500 bp, Artificial Sequence
  Description of Artificial Sequence: Synthetic polynucleotide
ccacccccgggagaccacgattatatctacaacctggacgagagtgaaggtgtctgtgacctctttgatgtgcctgttctcaacctctgactgacagggacatgccctgtgtggctgggacccagactgtctgacctgggggttgcctggggacctctcccacccgacccctacagagcttgagagccacagacgcctggcttctccggcctcccctcaccgcacagttctggccacagctcccgctcctgtgctggcacttctgtgctcgcagagcaggggaacaggactcagcccccatcaccgtggagccaaagtgtttgcttctccctttctgcggccttcgccagcccaggctcggctgccacccagtggcacagaaccgaggagctgccattaccccccatagggggcagtgtcttgttcctgccagcctcagtgtcttgcttctgccagctccttcccctaggagggaagggtggggtggaactgggcacatg

SEQ ID NO: 18 - DNA, 500 bp, Artificial Sequence
  Description of Artificial Sequence: Synthetic polynucleotide
attatatctacaacctggacgagagtgaaggtgtctgtgacctctttgatgtgcctgttctcaacctctgactgacagggacatgccctgtgtggctgggacccagactgtctgacctgggggttgcctggggacctctcccacccgacccctacagagcttgagagccacagacgcctggcttctccggcctcccctcaccgcacagttctggccacagctcccgctcctgtgctggcacttctgtgctcgcagagcaggggaacaggactcagcccccatcaccgtggagccaaagtgtttgcttctccctttctgcggccttcgccagcccaggctcggctgccacccagtggcacagaaccgaggagctgccattaccccccatagggggcagtgtcttgttcctgccagcctcagtgtcttgcttctgccagctccttcccctaggagggaagggtggggtggaactgggcacatgccagcaccacttctagctt

SEQ ID NO: 19 - DNA, 500 bp, Artificial Sequence
  Description of Artificial Sequence: Synthetic polynucleotide
tgactgacagggacatgccctgtgtggctgggacccagactgtctgacctgggggttgcctggggacctctcccacccgacccctacagagcttgagagccacagacgcctggcttctccggcctcccctcaccgcacagttctggccacagctcccgctcctgtgctggcacttctgtgctcgcagagcaggggaacaggactcagcccccatcaccgtggagccaaagtgtttgcttctccctttctgcggccttcgccagcccaggctcggctgccacccagtggcacagaaccgaggagctgccattaccccccatagggggcagtgtcttgttcctgccagcctcagtgtcttgcttctgccagctccttcccctaggagggaagggtggggtggaactgggcacatgccagcaccacttctagcttccttcgctatcccccaccccctgaccctccagctcctcctggccctctcacgtgcccacttctgctgg

SEQ ID NO: 20 - DNA, 626 bp, Artificial Sequence
  Description of Artificial Sequence: Synthetic polynucleotide
agagcagggtttcttgacagcagtgctattggcattttaaactggataattctttgttgtgatgggctttcctgtggactgtactatgttggtacacaagaaaaacagtgtactatgtgaatactcactcaaagccagtagcactccctgattgtaacaccaaaaaagtctctcagcattgccaaatgtcccctgtggcagcagaatcactccctgatgagaaccactaccctggagtaaaatctataactatgtcttagaaaataacacagaaaattaatatttctttcactctactccttccattagtgatcaaataaagaaggcatttggcgctacttgccaaattgttggctcaaacttgtgctgaaccttttttggttttctacacttaagtttttttgcctataacccagagaactttgaaaatagagtgtagttaatgtgtatctaatgttactttgtattgacttaatttaccggcctttaatccacagcataagaagtcccacggcaaggacaaagagaaccggggcatcaacacactggaacggtccaaggtcgaggaaacaaccgagcacctggtcaccaagagcagactgcctctgagagcccagatcaacctg

SEQ ID NO: 21 - DNA, 558 bp, Artificial Sequence
  Description of Artificial Sequence: Synthetic polynucleotide
ttcctgtggactgtactatgttggtacacaagaaaaacagtgtactatgtgaatactcactcaaagccagtagcactccctgattgtaacaccaaaaaagtctctcagcattgccaaatgtcccctgtggcagcagaatcactccctgatgagaaccactaccctggagtaaaatctataactatgtcttagaaaataacacagaaaattaatatttctttcactctactccttccattagtgatcaaataaagaaggcatttggcgctacttgccaaattgttggctcaaacttgtgctgaaccttttttggttttctacacttaagtttttttgcctataacccagagaactttgaaaatagagtgtagttaatgtgtatctaatgttactttgtattgacttaattttcccgccttaaatccacagcataaaaaatcacatggaaaagacaaagaaaacagaggcattaacacactggagaggtctaaagtggaagaaacaaccgagcacctggtcaccaagagcagactgcctctgagagcccagatcaacctg

SEQ ID NO: 22 - DNA, 590 bp, Artificial Sequence
  Description of Artificial Sequence: Synthetic polynucleotide
ttaaactggataattctttgttgtgatgggctttcctgtggactgtactatgttggtacacaagaaaaacagtgtactatgtgaatactcactcaaagccagtagcactccctgattgtaacaccaaaaaagtctctcagcattgccaaatgtcccctgtggcagcagaatcactccctgatgagaaccactaccctggagtaaaatctataactatgtcttagaaaataacacagaaaattaatatttctttcactctactccttccattagtgatcaaataaagaaggcatttggcgctacttgccaaattgttggctcaaacttgtgctgaaccttttttggttttctacacttaagtttttttgcctataacccagagaactttgaaaatagagtgtagttaatgtgtatctaatgttactttgtattgacttaattttcccgccttaaatccacagcataaaaaatcacatggaaaagacaaagaaaacagaggcatcaacacactggaacggtccaaggtcgaggaaacaaccgagcacctggtcaccaagagcagactgcctctgagagcccagatcaacctg

SEQ ID NO: 23 - DNA, 500 bp, Artificial Sequence
  Description of Artificial Sequence: Synthetic polynucleotide
aaaaaatcacatggaaaagacaaagaaaacagaggcattaacacactggagaggtctaaagtggaagaaactacagagcacttggttacaaagagcagattacctctgcgagcccagatcaacctttaattcacttgggggttggcaattttatttttaaagaaaacttaaaaataaaacctgaaaccccagaacttgagccttgtgtatagattttaaaagaatatatatatcagccgggcgcggtggctcatgcctgtaatcccagcactttgggaggctgaggcgggtggattgcttgagcccaggagtttgagaccagcctggccaacgtggcaaaacctcgtctctgttaaaaattagccgggcgtggtggcacactcctgtaatcccagctactggggaggctgaggcacgagaatcacttgaacccaggaagcggggttgcagtgagccaaaggtacaccactacactccagcctgggcaacagagcaagact

SEQ ID NO: 24 - DNA, 500 bp, Artificial Sequence
  Description of Artificial Sequence: Synthetic polynucleotide
aactacagagcacttggctacatagagcagattacctctgcgagcccagatcaacctttaattcacttgggggttggcaattttatttttaaagaaaacttaaaaataaaacctgaaaccccagaacttgagccttgtgtatagattttaaaagaatatatatatcagccgggcgcggtggctcatgcctgtaatcccagcactttgggaggctgaggcgggtggattgcttgagcccaggagtttgagaccagcctggccaacgtggcaaaacctcgtctctgttaaaaattagccgggcgtggtggcacactcctgtaatcccagctactggggaggctgaggcacgagaatcacttgaacccaggaagcggggttgcagtgagccaaaggtacaccactacactccagcctgggcaacagagcaagactcggtctcaaaaacaaaatttaaaaaagatataaggcagtactgtaaattcagttgaattttgatatct

SEQ ID NO: 25 - DNA, 500 bp, Artificial Sequence
  Description of Artificial Sequence: Synthetic polynucleotide
attaacacactggagagttctgaagtggaagaaactacagagcacttggttacaaagagcagattacctctgcgagcccagatcaacctttaattcacttgggggttggcaattttatttttaaagaaaacttaaaaataaaacctgaaaccccagaacttgagccttgtgtatagattttaaaagaatatatatatcagccgggcgcggtggctcatgcctgtaatcccagcactttgggaggctgaggcgggtggattgcttgagcccaggagtttgagaccagcctggccaacgtggcaaaacctcgtctctgttaaaaattagccgggcgtggtggcacactcctgtaatcccagctactggggaggctgaggcacgagaatcacttgaacccaggaagcggggttgcagtgagccaaaggtacaccactacactccagcctgggcaacagagcaagactcggtctcaaaaacaaaatttaaaaaagatataaggc

SEQ ID NO: 26 - DNA, 51 bp, Artificial Sequence
  Description of Artificial Sequence: Synthetic oligonucleotide
gcggccgcgtcgagtctagagggcccgtttaaacccgctgatcagcctcga

SEQ ID NO: 27 - DNA, 122 bp, Artificial Sequence
  Description of Artificial Sequence: Synthetic polynucleotide
aacttgtttattgcagcttataatggttacaaataaagcaatagcatcacaaatttcacaaataaagcatttttttcactgcattctagttgtggtttgtccaaactcatcaatgtatctta

SEQ ID NO: 28 - DNA, 225 bp, Artificial Sequence
  Description of Artificial Sequence: Synthetic polynucleotide
ctgtgccttctagttgccagccatctgttgtttgcccctcccccgtgccttccttgaccctggaaggtgccactcccactgtcctttcctaataaaatgaggaaattgcatcgcattgtctgagtaggtgtcattctattctggggggtggggtggggcaggacagcaagggggaggattgggaagacaatagcaggcatgctggggatgcggtgggctctatgg

SEQ ID NO: 29 - protein, 18 aa, Artificial Sequence
  Description of Artificial Sequence: Synthetic peptide
EGRGSLLTCGDVEENPGP

SEQ ID NO: 30 - protein, 19 aa, Artificial Sequence
  Description of Artificial Sequence: Synthetic peptide
ATNFSLLKQAGDVEENPGP

SEQ ID NO: 31 - protein, 20 aa, Artificial Sequence
  Description of Artificial Sequence: Synthetic peptide
QCTNYALLKLAGDVESNPGP

SEQ ID NO: 32 - protein, 22 aa, Artificial Sequence
  Description of Artificial Sequence: Synthetic peptide
VKQTLNFDLLKLAGDVESNPGP

SEQ ID NO: 33 - DNA, 54 bp, Artificial Sequence
  Description of Artificial Sequence: Synthetic oligonucleotide
gagggcagaggaagtcttctaacatgcggtgacgtggaggagaatcctggcccg

SEQ ID NO: 34 - DNA, 66 bp, Artificial Sequence
  Description of Artificial Sequence: Synthetic oligonucleotide
ggaagcggagctactaacttcagcctgctgaagcaggctggagacgtggaggagaaccctggacct

SEQ ID NO: 35 - DNA, 60 bp, Artificial Sequence
  Description of Artificial Sequence: Synthetic oligonucleotide
cagtgtactaattatgctctcttgaaattggctggagatgttgagagcaaccctggacct

SEQ ID NO: 36 - DNA, 66 bp, Artificial Sequence
  Description of Artificial Sequence: Synthetic oligonucleotide
gtgaaacagactttgaattttgaccttctcaagttggcgggagacgtggagtccaaccctggacct

SEQ ID NO: 37 - DNA, 574 bp, Artificial Sequence
  Description of Artificial Sequence: Synthetic polynucleotide
cccctctccctcccccccccctaacgttactggccgaagccgcttggaataaggccggtgtgcgtttgtctatatgttattttccaccatattgccgtcttttggcaatgtgagggcccggaaacctggccctgtcttcttgacgagcattcctaggggtctttcccctctcgccaaaggaatgcaaggtctgttgaatgtcgtgaaggaagcagttcctctggaagcttcttgaagacaaacaacgtctgtagcgaccctttgcaggcagcggaaccccccacctggcgacaggtgcctctgcggccaaaagccacgtgtataagatacacctgcaaaggcggcacaaccccagtgccacgttgtgagttggatagttgtggaaagagtcaaatggctctcctcaagcgtattcaacaaggggctgaaggatgcccagaaggtaccccattgtatgggatctgatctggggcctcggtgcacatgctttacatgtgtttagtcgaggttaaaaaaacgtctaggccccccgaaccacggggacgtggttttcctttgaaaaacacgatgataa

SEQ ID NO: 38 - DNA, 2867 bp, Artificial Sequence
  Description of Artificial Sequence: Synthetic polynucleotide
gaagactgtggatggcccctccgggaaactgtggcgtgatggccgcggggctctccagaacatcatccctgcctctactggcgctgccaaggctgtgggcaaggtcatccctgagctgaacgggaagctcactggcatggccttccgtgtccccactgccaacgtgtcagtggtggacctgacctgccgtctagaaaaacctgccaaatatgatgacatcaagaaggtggtgaagcaggcgtcggagggccccctcaagggcatcctgggctacactgagcaccaggtggtctcctctgacttcaacagcgacacccactcctccacctttgacgctggggctggcattgccctcaacgaccactttgtcaagctcatttcctggtatgtggctggggccagagactggctcttaaaaagtgcagggtctggcgccctctggtggctggctcagaaaaagggccctgacaactctttacatcttctaggtatgacaacgagttcggatatagcaatagagtggtcgatctgatggctcatatggctagcaaagaggagggcagaggaagtcttctaacatgcggtgacgtggaggagaatcctggcccgatggtgagcaagggcgaggagctgttcaccggggtggtgcccatcctggtcgagctggacggcgacgtaaacggccacaagttcagcgtgtccggcgagggcgagggcgatgccacctacggcaagctgaccctgaagttcatctgcaccaccggcaagctgcccgtgccctggcccaccctcgtgaccaccctgacctacggcgtgcagtgcttcagccgctaccccgaccacatgaagcagcacgacttcttcaagtccgccatgcccgaaggctacgtccaggagcgcaccatcttcttcaaggacgacggcaactacaagacccgcgccgaggtgaagttcgagggcgacaccctggtgaaccgcatcgagctgaagggcatcgacttcaaggaggacggcaacatcctggggcacaagctggagtacaactacaacagccacaacgtctatatcatggccgacaagcagaagaacggcatcaaggtgaacttcaagatccgccacaacatcgaggacggcagcgtgcagctcgccgaccactaccagcagaacacccccatcggcgacggccccgtgctgctgcccgacaaccactacctgagcacccagtccgccctgagcaaagaccccaacgagaagcgcgatcacatggtcctgctggagttcgtgaccgccgccgggatcactctcggcatggacgagctgtacaaggagggcagaggaagtcttctaacatgcggtgacgtggaggagaatcctggcccgatggtgagcaagggcgaggaggataacatggccatcatcaaggagttcatgcgcttcaaggtgcacatggagggctccgtgaacggccacgagttcgagatcgagggcgagggcgagggccgcccctacgagggcacccagaccgccaagctgaaggtgaccaagggtggccccctgcccttcgcctgggacatcctgtcccctcagttcatgtacggctccaaggcctacgtgaagcaccccgccgacatccccgactacttgaagctgtccttccccgagggcttcaagtgggagcgcgtgatgaacttcgaggacggcggcgtggtgaccgtgacccaggactcctccctgcaggacggcgagttcatctacaaggtgaagctgcgcggcaccaacttcccctccgacggccccgtaatgcagaagaagacaatgggctgggaggcctcctccgagcggatgtaccccgaggacggcgccctgaagggcgagatcaagcagaggctgaagctgaaggacggcggccactacgacgctgaggtcaagaccacctacaaggccaagaagcccgtgcagctgcccggcgcctacaacgtcaacatcaagttggacatcacctcccacaacgaggactacaccatcgtggaacagtacgaacgcgccgagggccgccactccaccggcggcatggacgagctgtacaagtaagcggccgcgtcgagtctagagggcccgtttaaacccgctgatcagcctcgactgtgccttctagttgccagccatctgttgtttgcccctcccccgtgccttccttgaccctggaaggtgccactcccactgtcctttcctaataaaatgaggaaattgcatcgcattgtctgagtaggtgtcattctattctggggggtggggtggggcaggacagcaagggggaggattgggaagacaatagcaggcatgctggggatgcggtgggctctatggatttggctacagcaacagggtggtggacctcatggcccacatggcctccaaggagtaagacccctggaccaccagccccagcaagagcacaagaggaagagagagaccctcactgctggggagtccctgccacactcagtcccccaccacactgaatctcccctcctcacagttgccatgtagaccccttgaagaggggaggggcctagggagccgcaccttgtcatgtaccatcaataaagtaccctgtgctcaaccagttacttgtcctgtcttattctagggtctggggcagaggggagggaagctgggcttgtgtcaaggtgagacattcttgctggggagggacctggtatgttctcctcagactgagggtagggcctccaaacagccttgcttgcttcgagaaccatttgcttcccgctcagacgtcttgagtgctacaggaagctggcaccactacttcagagaacaaggccttttcctctcctcgctccagt

SEQ ID NO: 39 - DNA, 3402 bp, Artificial Sequence
  Description of Artificial Sequence: Synthetic polynucleotide
gaagactgtggatggcccctccgggaaactgtggcgtgatggccgcggggctctccagaacatcatccctgcctctactggcgctgccaaggctgtgggcaaggtcatccctgagctgaacgggaagctcactggcatggccttccgtgtccccactgccaacgtgtcagtggtggacctgacctgccgtctagaaaaacctgccaaatatgatgacatcaagaaggtggtgaagcaggcgtcggagggccccctcaagggcatcctgggctacactgagcaccaggtggtctcctctgacttcaacagcgacacccactcctccacctttgacgctggggctggcattgccctcaacgaccactttgtcaagctcatttcctggtatgtggctggggccagagactggctcttaaaaagtgcagggtctggcgccctctggtggctggctcagaaaaagggccctgacaactctttacatcttctaggtatgacaacgagttcggatatagcaatagagtggtcgatctgatggctcatatggctagcaaagagggaagcggagctactaacttcagcctgctgaagcaggctggagacgtggaggagaaccctggacctatggtgagcaagggcgaggagctgttcaccggggtggtgcccatcctggtcgagctggacggcgacgtaaacggccacaagttcagcgtgtccggcgagggcgagggcgatgccacctacggcaagctgaccctgaagttcatctgcaccaccggcaagctgcccgtgccctggcccaccctcgtgaccaccctgacctacggcgtgcagtgcttcagccgctaccccgaccacatgaagcagcacgacttcttcaagtccgccatgcccgaaggctacgtccaggagcgcaccatcttcttcaaggacgacggcaactacaagacccgcgccgaggtgaagttcgagggcgacaccctggtgaaccgcatcgagctgaagggcatcgacttcaaggaggacggcaacatcctggggcacaagctggagtacaactacaacagccacaacgtctatatcatggccgacaagcagaagaacggcatcaaggtgaacttcaagatccgccacaacatcgaggacggcagcgtgcagctcgccgaccactaccagcagaacacccccatcggcgacggccccgtgctgctgcccgacaaccactacctgagcacccagtccgccctgagcaaagaccccaacgagaagcgcgatcacatggtcctgctggagttcgtgaccgccgccgggatcactctcggcatggacgagctgtacaagtaacccctctccctcccccccccctaacgttactggccgaagccgcttggaataaggccggtgtgcgtttgtctatatgttattttccaccatattgccgtcttttggcaatgtgagggcccggaaacctggccctgtcttcttgacgagcattcctaggggtctttcccctctcgccaaaggaatgcaaggtctgttgaatgtcgtgaaggaagcagttcctctggaagcttcttgaagacaaacaacgtctgtagcgaccctttgcaggcagcggaaccccccacctggcgacaggtgcctctgcggccaaaagccacgtgtataagatacacctgcaaaggcggcacaaccccagtgccacgttgtgagttggatagttgtggaaagagtcaaatggctctcctcaagcgtattcaacaaggggctgaaggatgcccagaaggtaccccattgtatgggatctgatctggggcctcggtgcacatgctttacatgtgtttagtcgaggttaaaaaaacgtctaggccccccgaaccacggggacgtggttttcctttgaaaaacacgatgataaatggtgagcaagggcgaggaggataacatggccatcatcaaggagttcatgcgcttcaaggtgcacatggagggctccgtgaacggccacgagttcgagatcgagggcgagggcgagggccgcccctacgagggcacccagaccgccaagctgaaggtgaccaagggtggccccctgcccttcgcctgggacatcctgtcccctcagttcatgtacggctccaaggcctacgtgaagcaccccgccgacatccccgactacttgaagctgtccttccccgagggcttcaagtgggagcgcgtgatgaacttcgaggacggcggcgtggtgaccgtgacccaggactcctccctgcaggacggcgagttcatctacaaggtgaagctgcgcggcaccaacttcccctccgacggccccgtaatgcagaagaagacaatgggctgggaggcctcctccgagcggatgtaccccgaggacggcgccctgaagggcgagatcaagcagaggctgaagctgaaggacggcggccactacgacgctgaggtcaagaccacctacaaggccaagaagcccgtgcagctgcccggcgcctacaacgtcaacatcaagttggacatcacctcccacaacgaggactacaccatcgtggaacagtacgaacgcgccgagggccgccactccaccggcggcatggacgagctgtacaagtaagcggccgcgtcgagtctagagggcccgtttaaacccgctgatcagcctcgactgtgccttctagttgccagccatctgttgtttgcccctcccccgtgccttccttgaccctggaaggtgccactcccactgtcctttcctaataaaatgaggaaattgcatcgcattgtctgagtaggtgtcattctattctggggggtggggtggggcaggacagcaagggggaggattgggaagacaatagcaggcatgctggggatgcggtgggctctatggatttggctacagcaacagggtggtggacctcatggcccacatggcctccaaggagtaagacccctggaccaccagccccagcaagagcacaagaggaagagagagaccctcactgctggggagtccctgccacactcagtcccccaccacactgaatctcccctcctcacagttgccatgtagaccccttgaagaggggaggggcctagggagccgcaccttgtcatgtaccatcaataaagtaccctgtgctcaaccagttacttgtcctgtcttattctagggtctggggcagaggggagggaagctgggcttgtgtcaaggtgagacattcttgctggggagggacctggtatgttctcctcagactgagggtagggcctccaaacagccttgcttgcttcgagaaccatttgcttcccgctcagacgtcttgagtgctacaggaagctggcaccactacttcagagaacaaggccttttcctctcctcgctccagt

SEQ ID NO: 40 - DNA, 2891 bp, Artificial Sequence
  Description of Artificial Sequence: Synthetic polynucleotide
gaagactgtggatggcccctccgggaaactgtggcgtgatggccgcggggctctccagaacatcatccctgcctctactggcgctgccaaggctgtgggcaaggtcatccctgagctgaacgggaagctcactggcatggccttccgtgtccccactgccaacgtgtcagtggtggacctgacctgccgtctagaaaaacctgccaaatatgatgacatcaagaaggtggtgaagcaggcgtcggagggccccctcaagggcatcctgggctacactgagcaccaggtggtctcctctgacttcaacagcgacacccactcctccacctttgacgctggggctggcattgccctcaacgaccactttgtcaagctcatttcctggtatgtggctggggccagagactggctcttaaaaagtgcagggtctggcgccctctggtggctggctcagaaaaagggccctgacaactctttacatcttctaggtatgacaacgagttcggatatagcaatagagtggtcgatctgatggctcatatggctagcaaagagggaagcggagctactaacttcagcctgctgaagcaggctggagacgtggaggagaaccctggacctatggtgagcaagggcgaggagctgttcaccggggtggtgcccatcctggtcgagctggacggcgacgtaaacggccacaagttcagcgtgtccggcgagggcgagggcgatgccacctacggcaagctgaccctgaagttcatctgcaccaccggcaagctgcccgtgccctggcccaccctcgtgaccaccctgacctacggcgtgcagtgcttcagccgctaccccgaccacatgaagcagcacgacttcttcaagtccgccatgcccgaaggctacgtccaggagcgcaccatcttcttcaaggacgacggcaactacaagacccgcgccgaggtgaagttcgagggcgacaccctggtgaaccgcatcgagctgaagggcatcgacttcaaggaggacggcaacatcctggggcacaagctggagtacaactacaacagccacaacgtctatatcatggccgacaagcagaagaacggcatcaaggtgaacttcaagatccgccacaacatcgaggacggcagcgtgcagctcgccgaccactaccagcagaacacccccatcggcgacggccccgtgctgctgcccgacaaccactacctgagcacccagtccgccctgagcaaagaccccaacgagaagcgcgatcacatggtcctgctggagttcgtgaccgccgccgggatcactctcggcatggacgagctgtacaagggaagcggagctactaacttcagcctgctgaagcaggctggagacgtggaggagaaccctggacctatggtgagcaagggcgaggaggataacatggccatcatcaaggagttcatgcgcttcaaggtgcacatggagggctccgtgaacggccacgagttcgagatcgagggcgagggcgagggccgcccctacgagggcacccagaccgccaagctgaaggtgaccaagggtggccccctgcccttcgcctgggacatcctgtcccctcagttcatgtacggctccaaggcctacgtgaagcaccccgccgacatccccgactacttgaagctgtccttccccgagggcttcaagtgggagcgcgtgatgaacttcgaggacggcggcgtggtgaccgtgacccaggactcctccctgcaggacggcgagttcatctacaaggtgaagctgcgcggcaccaacttcccctccgacggccccgtaatgcagaagaagacaatgggctgggaggcctcctccgagcggatgtaccccgaggacggcgccctgaagggcgagatcaagcagaggctgaagctgaaggacggcggccactacgacgctgaggtcaagaccacctacaaggccaagaagcccgtgcagctgcccggcgcctacaacgtcaacatcaagttggacatcacctcccacaacgaggactacaccatcgtggaacagtacgaacgcgccgagggccgccactccaccggcggcatggacgagctgtacaagtaagcggccgcgtcgagtctagagggcccgtttaaacccgctgatcagcctcgactgtgccttctagttgccagccatctgttgtttgcccctcccccgtgccttccttgaccctggaaggtgccactcccactgtcctttcctaataaaatgaggaaattgcatcgcattgtctgagtaggtgtcattctattctggggggtggggtggggcaggacagcaagggggaggattgggaagacaatagcaggcatgctggggatgcggtgggctctatggatttggctacagcaacagggtggtggacctcatggcccacatggcctccaaggagtaagacccctggaccaccagccccagcaagagcacaagaggaagagagagaccctcactgctggggagtccctgccacactcagtcccccaccacactgaatctcccctcctcacagttgccatgtagaccccttgaagaggggaggggcctagggagccgcaccttgtcatgtaccatcaataaagtaccctgtgctcaaccagttacttgtcctgtcttattctagggtctggggcagaggggagggaagctgggcttgtgtcaaggtgagacattcttgctggggagggacctggtatgttctcctcagactgagggtagggcctccaaacagccttgcttgcttcgagaaccatttgcttcccgctcagacgtcttgagtgctacaggaagctggcaccactacttcagagaacaaggccttttcctctcctcgctccagt

SEQ ID NO: 41 - DNA, 2879 bp, Artificial Sequence
  Description of Artificial Sequence: Synthetic polynucleotide
gaagactgtggatggcccctccgggaaactgtggcgtgatggccgcggggctctccagaacatcatccctgcctctactggcgctgccaaggctgtgggcaaggtcatccctgagctgaacgggaagctcactggcatggccttccgtgtccccactgccaacgtgtcagtggtggacctgacctgccgtctagaaaaacctgccaaatatgatgacatcaagaaggtggtgaagcaggcgtcggagggccccctcaagggcatcctgggctacactgagcaccaggtggtctcctctgacttcaacagcgacacccactcctccacctttgacgctggggctggcattgccctcaacgaccactttgtcaagctcatttcctggtatgtggctggggccagagactggctcttaaaaagtgcagggtctggcgccctctggtggctggctcagaaaaagggccctgacaactctttacatcttctaggtatgacaacgagttcggatatagcaatagagtggtcgatctgatggctcatatggctagcaaagagggaagcggagctactaacttcagcctgctgaagcaggctggagacgtggaggagaaccctggacctatggtgagcaagggcgaggagctgttcaccggggtggtgcccatcctggtcgagctggacggcgacgtaaacggccacaagttcagcgtgtccggcgagggcgagggcgatgccacctacggcaagctgaccctgaagttcatctgcaccaccggcaagctgcccgtgccctggcccaccctcgtgaccaccctgacctacggcgtgcagtgcttcagccgctaccccgaccacatgaagcagcacgacttcttcaagtccgccatgcccgaaggctacgtccaggagcgcaccatcttcttcaaggacgacggcaactacaagacccgcgccgaggtgaagttcgagggcgacaccctggtgaaccgcatcgagctgaagggcatcgacttcaaggaggacggcaacatcctggggcacaagctggagtacaactacaacagccacaacgtctatatcatggccgacaagcagaagaacggcatcaaggtgaacttcaagatccgccacaacatcgaggacggcagcgtgcagctcgccgaccactaccagcagaacacccccatcggcgacggccccgtgctgctgcccgacaaccactacctgagcacccagtccgccctgagcaaagaccccaacgagaagcgcgatcacatggtcctgctggagttcgtgaccgccgccgggatcactctcggcatggacgagctgtacaaggagggcagaggaagtcttctaacatgcggtgacgtggaggagaatcctggcccgatggtgagcaagggcgaggaggataacatggccatcatcaaggagttcatgcgcttcaaggtgcacatggagggctccgtgaacggccacgagttcgagatcgagggcgagggcgagggccgcccctacgagggcacccagaccgccaagctgaaggtgaccaagggtggccccctgcccttcgcctgggacatcctgtcccctcagttcatgtacggctccaaggcctacgtgaagcaccccgccgacatccccgactacttgaagctgtccttccccgagggcttcaagtgggagcgcgtgatgaacttcgaggacggcggcgtggtgaccgtgacccaggactcctccctgcaggacggcgagttcatctacaaggtgaagctgcgcggcaccaacttcccctccgacggccccgtaatgcagaagaagacaatgggctgggaggcctcctccgagcggatgtaccccgaggacggcgccctgaagggcgagatcaagcagaggctgaagctgaaggacggcggccactacgacgctgaggtcaagaccacctacaaggccaagaagcccgtgcagctgcccggcgcctacaacgtcaacatcaagttggacatcacctcccacaacgaggactacaccatcgtggaacagtacgaacgcgccgagggccgccactccaccggcggcatggacgagctgtacaagtaagcggccgcgtcgagtctagagggcccgtttaaacccgctgatcagcctcgactgtgccttctagttgccagccatctgttgtttgcccctcccccgtgccttccttgaccctggaaggtgccactcccactgtcctttcctaataaaatgaggaaattgcatcgcattgtctgagtaggtgtcattctattctggggggtggggtggggcaggacagcaagggggaggattgggaagacaatagcaggcatgctggggatgcggtgggctctatggatttggctacagcaacagggtggtggacctcatggcccacatggcctccaaggagtaagacccctggaccaccagccccagcaagagcacaagaggaagagagagaccctcactgctggggagtccctgccacactcagtcccccaccacactgaatctcccctcctcacagttgccatgtagaccccttgaagaggggaggggcctagggagccgcaccttgtcatgtaccatcaataaagtaccctgtgctcaaccagttacttgtcctgtcttattctagggtctggggcagaggggagggaagctgggcttgtgtcaaggtgagacattcttgctggggagggacctggtatgttctcctcagactgagggtagggcctccaaacagccttgcttgcttcgagaaccatttgcttcccgctcagacgtcttgagtgctacaggaagctggcaccactacttcagagaacaaggccttttcctctcctcgctccagt

SEQ ID NO: 42 - DNA, 2879 bp, Artificial Sequence
  Description of Artificial Sequence: Synthetic polynucleotide
gaagactgtggatggcccctccgggaaactgtggcgtgatggccgcggggctctccagaacatcatccctgcctctactggcgctgccaaggctgtgggcaaggtcatccctgagctgaacgggaagctcactggcatggccttccgtgtccccactgccaacgtgtcagtggtggacctgacctgccgtctagaaaaacctgccaaatatgatgacatcaagaaggtggtgaagcaggcgtcggagggccccctcaagggcatcctgggctacactgagcaccaggtggtctcctctgacttcaacagcgacacccactcctccacctttgacgctggggctggcattgccctcaacgaccactttgtcaagctcatttcctggtatgtggctggggccagagactggctcttaaaaagtgcagggtctggcgccctctggtggctggctcagaaaaagggccctgacaactctttacatcttctaggtatgacaacgagttcggatatagcaatagagtggtcgatctgatggctcatatggctagcaaagaggagggcagaggaagtcttctaacatgcggtgacgtggaggagaatcctggcccgatggtgagcaagggcgaggagctgttcaccggggtggtgcccatcctggtcgagctggacggcgacgtaaacggccacaagttcagcgtgtccggcgagggcgagggcgatgccacctacggcaagctgaccctgaagttcatctgcaccaccggcaagctgcccgtgccctggcccaccctcgtgaccaccctgacctacggcgtgcagtgcttcagccgctaccccgaccacatgaagcagcacgacttcttcaagtccgccatgcccgaaggctacgtccaggagcgcaccatcttcttcaaggacgacggcaactacaagacccgcgccgaggtgaagttcgagggcgacaccctggtgaaccgcatcgagctgaagggcatcgacttcaaggaggacggcaacatcctggggcacaagctggagtacaactacaacagccacaacgtctatatcatggccgacaagcagaagaacggcatcaaggtgaacttcaagatccgccacaacatcgaggacggcagcgtgcagctcgccgaccactaccagcagaacacccccatcggcgacggccccgtgctgctgcccgacaaccactacctgagcacccagtccgccctgagcaaagaccccaacgagaagcgcgatcacatggtcctgctggagttcgtgaccgccgccgggatcactctcggcatggacgagctgtacaagggaagcggagctactaacttcagcctgctgaagcaggctggagacgtggaggagaaccctggacctatggtgagcaagggcgaggaggataacatggccatcatcaaggagttcatgcgcttcaaggtgcacatggagggctccgtgaacggccacgagttcgagatcgagggcgagggcgagggccgcccctacgagggcacccagaccgccaagctgaaggtgaccaagggtggccccctgcccttcgcctgggacatcctgtcccctcagttcatgtacggctccaaggcctacgtgaagcaccccgccgacatccccgactacttgaagctgtccttccccgagggcttcaagtgggagcgcgtgatgaacttcgaggacggcggcgtggtgaccgtgacccaggactcctccctgcaggacggcgagttcatctacaaggtgaagctgcgcggcaccaacttcccctccgacggccccgtaatgcagaagaagacaatgggctgggaggcctcctccgagcggatgtaccccgaggacggcgccctgaagggcgagatcaagcagaggctgaagctgaaggacggcggccactacgacgctgaggtcaagaccacctacaaggccaagaagcccgtgcagctgcccggcgcctacaacgtcaacatcaagttggacatcacctcccacaacgaggactacaccatcgtggaacagtacgaacgcgccgagggccgccactccaccggcggcatggacgagctgtacaagtaagcggccgcgtcgagtctagagggcccgtttaaacccgctgatcagcctcgactgtgccttctagttgccagccatctgttgtttgcccctcccccgtgccttccttgaccctggaaggtgccactcccactgtcctttcctaataaaatgaggaaattgcatcgcattgtctgagtaggtgtcattctattctggggggtggggtggggcaggacagcaagggggaggattgggaagacaatagcaggcatgctggggatgcggtgggctctatggatttggctacagcaacagggtggtggacctcatggcccacatggcctccaaggagtaagacccctggaccaccagccccagcaagagcacaagaggaagagagagaccctcactgctggggagtccctgccacactcagtcccccaccacactgaatctcccctcctcacagttgccatgtagaccccttgaagaggggaggggcctagggagccgcaccttgtcatgtaccatcaataaagtaccctgtgctcaaccagttacttgtcctgtcttattctagggtctggggcagaggggagggaagctgggcttgtgtcaaggtgagacattcttgctggggagggacctggtatgttctcctcagactgagggtagggcctccaaacagccttgcttgcttcgagaaccatttgcttcccgctcagacgtcttgagtgctacaggaagctggcaccactacttcagagaacaaggccttttcctctcctcgctccagt

SEQ ID NO: 43 - DNA, 3390 bp, Artificial Sequence
  Description of Artificial Sequence: Synthetic polynucleotide
gaagactgtggatggcccctccgggaaactgtggcgtgatggccgcggggctctccagaacatcatccctgcctctactggcgctgccaaggctgtgggcaaggtcatccctgagctgaacgggaagctcactggcatggccttccgtgtccccactgccaacgtgtcagtggtggacctgacctgccgtctagaaaaacctgccaaatatgatgacatcaagaaggtggtgaagcaggcgtcggagggccccctcaagggcatcctgggctacactgagcaccaggtggtctcctctgacttcaacagcgacacccactcctccacctttgacgctggggctggcattgccctcaacgaccactttgtcaagctcatttcctggtatgtggctggggccagagactggctcttaaaaagtgcagggtctggcgccctctggtggctggctcagaaaaagggccctgacaactctttacatcttctaggtatgacaacgagttcggatatagcaatagagtggtcgatctgatggctcatatggctagcaaagaggagggcagaggaagtcttctaacatgcggtgacgtggaggagaatcctggcccgatggtgagcaagggcgaggagctgttcaccggggtggtgcccatcctggtcgagctggacggcgacgtaaacggccacaagttcagcgtgtccggcgagggcgagggcgatgccacctacggcaagctgaccctgaagttcatctgcaccaccggcaagctgcccgtgccctggcccaccctcgtgaccaccctgacctacggcgtgcagtgcttcagccgctaccccgaccacatgaagcagcacgacttcttcaagtccgccatgcccgaaggctacgtccaggagcgcaccatcttcttcaaggacgacggcaactacaagacccgcgccgaggtgaagttcgagggcgacaccctggtgaaccgcatcgagctgaagggcatcgacttcaaggaggacggcaacatcctggggcacaagctggagtacaactacaacagccacaacgtctatatcatggccgacaagcagaagaacggcatcaaggtgaacttcaagatccgccacaacatcgaggacggcagcgtgcagctcgccgaccactaccagcagaacacccccatcggcgacggccccgtgctgctgcccgacaaccactacctgagcacccagtccgccctgagcaaagaccccaacgagaagcgcgatcacatggtcctgctggagttcgtgaccgccgccgggatcactctcggcatggacgagctgtacaagtaacccctctccctcccccccccctaacgttactggccgaagccgcttggaataaggccggtgtgcgtttgtctatatgttattttccaccatattgccgtcttttggcaatgtgagggcccggaaacctggccctgtcttcttgacgagcattcctaggggtctttcccctctcgccaaaggaatgcaaggtctgttgaatgtcgtgaaggaagcagttcctctggaagcttcttgaagacaaacaacgtctgtagcgaccctttgcaggcagcggaaccccccacctggcgacaggtgcctctgcggccaaaagccacgtgtataagatacacctgcaaaggcggcacaaccccagtgccacgttgtgagttggatagttgtggaaagagtcaaatggctctcctcaagcgtattcaacaaggggctgaaggatgcccagaaggtaccccattgtatgggatctgatctggggcctcggtgcacatgctttacatgtgtttagtcgaggttaaaaaaacgtctaggccccccgaaccacggggacgtggttttcctttgaaaaacacgatgataaatggtgagcaagggcgaggaggataacatggccatcatcaaggagttcatgcgcttcaaggtgcacatggagggctccgtgaacggccacgagttcgagatcgagggcgagggcgagggccgcccctacgagggcacccagaccgccaagctgaaggtgaccaagggtggccccctgcccttcgcctgggacatcctgtcccctcagttcatgtacggctccaaggcctacgtgaagcaccccgccgacatccccgactacttgaagctgtccttccccgagggcttcaagtgggagcgcgtgatgaacttcgaggacggcggcgtggtgaccgtgacccaggactcctccctgcaggacggcgagttcatctacaaggtgaagctgcgcggcaccaacttcccctccgacggccccgtaatgcagaagaagacaatgggctgggaggcctcctccgagcggatgtaccccgaggacggcgccctgaagggcgagatcaagcagaggctgaagctgaaggacggcggccactacgacgctgaggtcaagaccacctacaaggccaagaagcccgtgcagctgcccggcgcctacaacgtcaacatcaagttggacatcacctcccacaacgaggactacaccatcgtggaacagtacgaacgcgccgagggccgccactccaccggcggcatggacgagctgtacaagtaagcggccgcgtcgagtctagagggcccgtttaaacccgctgatcagcctcgactgtgccttctagttgccagccatctgttgtttgcccctcccccgtgccttccttgaccctggaaggtgccactcccactgtcctttcctaataaaatgaggaaattgcatcgcattgtctgagtaggtgtcattctattctggggggtggggtggggcaggacagcaagggggaggattgggaagacaatagcaggcatgctggggatgcggtgggctctatggatttggctacagcaacagggtggtggacctcatggcccacatggcctccaaggagtaagacccctggaccaccagccccagcaagagcacaagaggaagagagagaccctcactgctggggagtccctgccacactcagtcccccaccacactgaatctcccctcctcacagttgccatgtagaccccttgaagaggggaggggcctagggagccgcaccttgtcatgtaccatcaataaagtaccctgtgctcaaccagttacttgtcctgtcttattctagggtctggggcagaggggagggaagctgggcttgtgtcaaggtgagacattcttgctggggagggacctggtatgttctcctcagactgagggtagggcctccaaacagccttgcttgcttcgagaaccatttgcttcccgctcagacgtcttgagtgctacaggaagctggcaccactacttcagagaacaaggccttttcctctcctcgctccagt

SEQ ID NO: 44 - DNA, 2117 bp, Artificial Sequence
  Description of Artificial Sequence: Synthetic polynucleotide
gaagactgtggatggcccctccgggaaactgtggcgtgatggccgcggggctctccagaacatcatccctgcctctactggcgctgccaaggctgtgggcaaggtcatccctgagctgaacgggaagctcactggcatggccttccgtgtccccactgccaacgtgtcagtggtggacctgacctgccgtctagaaaaacctgccaaatatgatgacatcaagaaggtggtgaagcaggcgtcggagggccccctcaagggcatcctgggctacactgagcaccaggtggtctcctctgacttcaacagcgacacccactcctccacctttgacgctggggctggcattgccctcaacgaccactttgtcaagctcatttcctggtatgtggctggggccagagactggctcttaaaaagtgcagggtctggcgccctctggtggctggctcagaaaaagggccctgacaactctttacatcttctaggtatgacaacgagttcggatatagcaatagagtggtcgatctgatggctcatatggctagcaaagagggaagcggagctactaacttcagcctgctgaagcaggctggagacgtggaggagaaccctggacctatggtgagcaagggcgaggagctgttcaccggggtggtgcccatcctggtcgagctggacggcgacgtaaacggccacaagttcagcgtgtccggcgagggcgagggcgatgccacctacggcaagctgaccctgaagttcatctgcaccaccggcaagctgcccgtgccctggcccaccctcgtgaccaccctgacctacggcgtgcagtgcttcagccgctaccccgaccacatgaagcagcacgacttcttcaagtccgccatgcccgaaggctacgtccaggagcgcaccatcttcttcaaggacgacggcaactacaagacccgcgccgaggtgaagttcgagggcgacaccctggtgaaccgcatcgagctgaagggcatcgacttcaaggaggacggcaacatcctggggcacaagctggagtacaactacaacagccacaacgtctatatcatggccgacaagcagaagaacggcatcaaggtgaacttcaagatccgccacaacatcgaggacggcagcgtgcagctcgccgaccactaccagcagaacacccccatcggcgacggccccgtgctgctgcccgacaaccactacctgagcacccagtccgccctgagcaaagaccccaacgagaagcgcgatcacatggtcctgctggagttcgtgaccgccgccgggatcactctcggcatggacgagctgtacaagtgagcggccgcgtcgagtctagagggcccgtttaaacccgctgatcagcctcgactgtgccttctagttgccagccatctgttgtttgcccctcccccgtgccttccttgaccctggaaggtgccactcccactgtcctttcctaataaaatgaggaaattgcatcgcattgtctgagtaggtgtcattctattctggggggtggggtggggcaggacagcaagggggaggattgggaagacaatagcaggcatgctggggatgcggtgggctctatggatttggctacagcaacagggtggtggacctcatggcccacatggcctccaaggagtaagacccctggaccaccagccccagcaagagcacaagaggaagagagagaccctcactgctggggagtccctgccacactcagtcccccaccacactgaatctcccctcctcacagttgccatgtagaccccttgaagaggggaggggcctagggagccgcaccttgtcatgtaccatcaataaagtaccctgtgctcaaccagttacttgtcctgtcttattctagggtctggggcagaggggagggaagctgggcttgtgtcaaggtgagacattcttgctggggagggacctggtatgttctcctcagactgagggtagggcctccaaacagccttgcttgcttcgagaaccatttgcttcccgctcagacgtcttgagtgctacaggaagctggcaccactacttcagagaacaaggccttttcctctcctcgctccagt

SEQ ID NO: 45 - DNA, 2585 bp, Artificial Sequence
  Description of Artificial Sequence: Synthetic polynucleotide
gaagactgtggatggcccctccgggaaactgtggcgtgatggccgcggggctctccagaacatcatccctgcctctactggcgctgccaaggctgtgggcaaggtcatccctgagctgaacgggaagctcactggcatggccttccgtgtccccactgccaacgtgtcagtggtggacctgacctgccgtctagaaaaacctgccaaatatgatgacatcaagaaggtggtgaagcaggcgtcggagggccccctcaagggcatcctgggctacactgagcaccaggtggtctcctctgacttcaacagcgacacccactcctccacctttgacgctggggctggcattgccctcaacgaccactttgtcaagctcatttcctggtatgtggctggggccagagactggctcttaaaaagtgcagggtctggcgccctctggtggctggctcagaaaaagggccctgacaactctttacatcttctaggtatgacaacgagttcggatatagcaatagagtggtcgatctgatggctcatatggctagcaaagagggaagcggagctactaacttcagcctgctgaagcaggctggagacgtggaggagaaccctggacctatggattggacctggatcctgtttctggtggccgctgccacaagagtgcacagcaattgggtcaacgtgatcagcgacctgaagaagatcgaggacctgatccagagcatgcacatcgacgccacactgtacaccgagtccgatgtgcaccctagctgcaaagtgaccgccatgaagtgctttctgctggaactgcaagtgatcagcctggaaagcggcgacgccagcatccacgataccgtggaaaacctgatcatcctggccaacaacagcctgagcagcaacggcaatgtgaccgagagcggctgcaaagagtgcgaggaactggaagagaagaacatcaaagagttcctccagagcttcgtccacatcgtgcagatgttcatcaacaccagctctggcggaggaagcggaggcggaggatctggtggtggtggatctggcggcggtggtagtggcggaggttctctgcaaatcacctgtcctccacctatgagcgtggaacacgccgacatctgggtcaagagctacagcctgtacagcagagagcggtacatctgcaacagcggcttcaagagaaaggccggcacaagcagcctgaccgagtgtgtgctgaacaaggccacaaacgtggcccactggaccacacctagcctgaagtgcatcagagatcccgctctggttcatcagaggcctgcccctccatctacagtgacaacagctggcgtgacccctcagcctgagtctctgtctccatctggaaaagagcctgccgccagctctcccagctctaacaatactgctgccaccacagccgctatcgtgcctggatctcagctgatgcctagcaagagccctagcaccggcacaacagagatcagctctcacgagagcagccacggaacaccttctcagaccaccgccaagaattgggagctgacagcctctgcctctcatcagccacctggcgtgtacccacagggccactctgatacaacagtggccatcagcaccagcaccgttctgctgtgtggcctgtctgctgttagcctgctggcctgctacctgaagtctagacagacacctcctctggccagcgtggaaatggaagccatggaagctctgcctgtcacatggggcaccagcagcagagatgaggacctcgagaattgcagccaccacctgtaggcggccgcgtcgagtctagagggcccgtttaaacccgctgatcagcctcgactgtgccttctagttgccagccatctgttgtttgcccctcccccgtgccttccttgaccctggaaggtgccactcccactgtcctttcctaataaaatgaggaaattgcatcgcattgtctgagtaggtgtcattctattctggggggtggggtggggcaggacagcaagggggaggattgggaagacaatagcaggcatgctggggatgcggtgggctctatggatttggctacagcaacagggtggtggacctcatggcccacatggcctccaaggagtaagacccctggaccaccagccccagcaagagcacaagaggaagagagagaccctcactgctggggagtccctgccacactcagtcccccaccacactgaatctcccctcctcacagttgccatgtagaccccttgaagaggggaggggcctagggagccgcaccttgtcatgtaccatcaataaagtaccctgtgctcaaccagttacttgtcctgtcttattctagggtctggggcagaggggagggaagctgggcttgtgtcaaggtgagacattcttgctggggagggacctggtatgttctcctcagactgagggtagggcctccaaacagccttgcttgcttcgagaaccatttgcttcccgctcagacgtcttgagtgctacaggaagctggcaccactacttcagagaacaaggccttttcctctcctcgctccagt

SEQ ID NO: 46 - DNA, 2129 bp, Artificial Sequence
  Description of Artificial Sequence: Synthetic polynucleotide
ggctttcccataatttcctttcaaggtggggagggaggtagaggggtgatgtggggagtacgctgcagggcctcactccttttgcagaccacagtccatgccatcactgccacccagaagactgtggatggcccctccgggaaactgtggcgtgatggccgcggggctctccagaacatcatccctgcctctactggcgctgccaaggctgtgggcaaggtcatccctgagctgaacgggaagctcactggcatggccttccgtgtccccactgccaacgtgtcagtggtggacctgacctgccgtctagaaaaacctgccaaatatgatgacatcaagaaggtggtgaagcaggcgtcggagggccccctcaagggcatcctgggctacactgagcaccaggtggtctcctctgacttcaacagcgacacccactcctccacctttgacgctggggctggcattgccctcaacgaccactttgtcaagctcatctcttggtacgacaatgagttcggatatagcaatagagtggtcgatctgatggctcatatggctagcaaagagggaagcggagctactaacttcagcctgctgaagcaggctggagacgtggaggagaaccctggacctatggtgagcaagggcgaggagctgttcaccggggtggtgcccatcctggtcgagctggacggcgacgtaaacggccacaagttcagcgtgtccggcgagggcgagggcgatgccacctacggcaagctgaccctgaagttcatctgcaccaccggcaagctgcccgtgccctggcccaccctcgtgaccaccctgacctacggcgtgcagtgcttcagccgctaccccgaccacatgaagcagcacgacttcttcaagtccgccatgcccgaaggctacgtccaggagcgcaccatcttcttcaaggacgacggcaactacaagacccgcgccgaggtgaagttcgagggcgacaccctggtgaaccgcatcgagctgaagggcatcgacttcaaggaggacggcaacatcctggggcacaagctggagtacaactacaacagccacaacgtctatatcatggccgacaagcagaagaacggcatcaaggtgaacttcaagatccgccacaacatcgaggacggcagcgtgcagctcgccgaccactaccagcagaacacccccatcggcgacggccccgtgctgctgcccgacaaccactacctgagcacccagtccgccctgagcaaagaccccaacgagaagcgcgatcacatggtcctgctggagttcgtgaccgccgccgggatcactctcggcatggacgagctgtacaagtgagcggccgcgtcgagtctagagggcccgtttaaacccgctgatcagcctcgactgtgccttctagttgccagccatctgttgtttgcccctcccccgtgccttccttgaccctggaaggtgccactcccactgtcctttcctaataaaatgaggaaattgcatcgcattgtctgagtaggtgtcattctattctggggggtggggtggggcaggacagcaagggggaggattgggaagacaatagcaggcatgctggggatgcggtgggctctatggagactggctcttaaaaagtgcagggtctggcgccctctggtggctggctcagaaaaagggccctgacaactcttttcatcttctaggtatgacaacgaatttggctacagcaacagggtggtggacctcatggcccacatggcctccaaggagtaagacccctggaccaccagccccagcaagagcacaagaggaagagagagaccctcactgctggggagtccctgccacactcagtcccccaccacactgaatctcccctcctcacagttgccatgtagaccccttgaagaggggaggggcctagggagccgcaccttgtcatgtaccatcaataaagtaccctgtgctcaaccagttacttgtcctgtcttattctagggtctggggcagaggggagggaagctgggcttgtgtcaaggtgagacattcttgctggggagggacctggtatgttctcctcagactgagggtagggcctccaaacagccttgcttgct

SEQ ID NO: 47 - DNA, 2124 bp, Artificial Sequence
  Description of Artificial Sequence: Synthetic polynucleotide
gcagacttccatttacagtgaggaggtgagcattgcattgaacaaaagatggcgttttcacttggaattagttatctgaagctttaggattcctcagcaatatgattatgagacaagaaaggaagattcagaaatgagtctagttgaaggcagcaattcagagaagaagattcagttgttatcattgccgtcctgcttggtttatggcctggttcaggaccaaggagagaagtgtgaatacatgcctcttgagctatagaatgagacgctggagtcactaagatgattttttaaaagtattgttttataaacaaaaataagattgtgacaagggattccactattaatgttttcatgcctgtgccttaatctgactgggtatggtgagaattgtgcttgcagctttaaggtaagaattttaccatcttaatatgttaagaagtgccatttcagtctctcatctctactccaacttgtcttcttaggtgctaaagtcagagccgaaatctacgaggccttcgagaacatctaccccatcctgaagggcttcagaaagaccaccggaagcggagctactaacttcagcctgctgaagcaggctggagacgtggaggagaaccctggacctatggtgagcaagggcgaggagctgttcaccggggtggtgcccatcctggtcgagctggacggcgacgtaaacggccacaagttcagcgtgtccggcgagggcgagggcgatgccacctacggcaagctgaccctgaagttcatctgcaccaccggcaagctgcccgtgccctggcccaccctcgtgaccaccctgacctacggcgtgcagtgcttcagccgctaccccgaccacatgaagcagcacgacttcttcaagtccgccatgcccgaaggctacgtccaggagcgcaccatcttcttcaaggacgacggcaactacaagacccgcgccgaggtgaagttcgagggcgacaccctggtgaaccgcatcgagctgaagggcatcgacttcaaggaggacggcaacatcctggggcacaagctggagtacaactacaacagccacaacgtctatatcatggccgacaagcagaagaacggcatcaaggtgaacttcaagatccgccacaacatcgaggacggcagcgtgcagctcgccgaccactaccagcagaacacccccatcggcgacggccccgtgctgctgcccgacaaccactacctgagcacccagtccgccctgagcaaagaccccaacgagaagcgcgatcacatggtcctgctggagttcgtgaccgccgccgggatcactctcggcatggacgagctgtacaagtgagcggccgcgtcgagtctagagggcccgtttaaacccgctgatcagcctcgactgtgccttctagttgccagccatctgttgtttgcccctcccccgtgccttccttgaccctggaaggtgccactcccactgtcctttcctaataaaatgaggaaattgcatcgcattgtctgagtaggtgtcattctattctggggggtggggtggggcaggacagcaagggggaggattgggaagacaatagcaggcatgctggggatgcggtgggctctatggcagaaatttatgaagcatttgaaaacatctaccctattctaaagggattcaggaagacgacgtaatggctctcatgtacccttgcctcccccacccccttctttttttttttttaaacaaatcagtttgttttggtacctttaaatggtggtgttgtgagaagatggatgttgagttgcagggtgtggcaccaggtgatgcccttctgtaagtgcccaccgcgggatgccgggaaggggcattatttgtgcactgagaacaccgcgcagcgtgactgtgagttgctcataccgtgctgctatctgggcagcgctgcccatttatttatatgtagattttaaacactgctgttgacaagttggtttgagggagaaaactttaagtgttaaagccacctctataattgattggactttttaattttaatgtttttccccatgaaccacagtttttatatttctaccagaaaagtaaaaatcttttttaaaagtgttgttttt

SEQ ID NO: 48 - DNA, 2369 bp, Artificial Sequence
  Description of Artificial Sequence: Synthetic polynucleotide
gaagactgtggatggcccctccgggaaactgtggcgtgatggccgcggggctctccagaacatcatccctgcctctactggcgctgccaaggctgtgggcaaggtcatccctgagctgaacgggaagctcactggcatggccttccgtgtccccactgccaacgtgtcagtggtggacctgacctgccgtctagaaaaacctgccaaatatgatgacatcaagaaggtggtgaagcaggcgtcggagggccccctcaagggcatcctgggctacactgagcaccaggtggtctcctctgacttcaacagcgacacccactcctccacctttgacgctggggctggcattgccctcaacgaccactttgtcaagctcatttcctggtatgtggctggggccagagactggctcttaaaaagtgcagggtctggcgccctctggtggctggctcagaaaaagggccctgacaactctttacatcttctaggtatgacaacgagttcggatatagcaatagagtggtcgatctgatggctcatatggctagcaaagagggaagcggagctactaacttcagcctgctgaagcaggctggagacgtggaggagaaccctggacctatgtggcccctggtagcggcgctgttgctgggctcggcgtgctgcggatcagctcagctactatttaataaaacaaaatctgtagaattcacgttttgtaatgacactgtcgtcattccatgctttgttactaatatggaggcacaaaacactactgaagtatacgtaaagtggaaatttaaaggaagagatatttacacctttgatggagctctaaacaagtccactgtccccactgactttagtagtgcaaaaattgaagtctcacaattactaaaaggagatgcctctttgaagatggataagagtgatgctgtctcacacacaggaaactacacttgtgaagtaacagaattaaccagagaaggtgaaacgatcatcgagctaaaatatcgtgttgtttcatggttttctccaaatgaaaatattcttattgttattttcccaatttttgctatactcctgttctggggacagtttggtattaaaacacttaaatatagatccggtggtatggatgagaaaacaattgctttacttgttgctggactagtgatcactgtcattgtcattgttggagccattcttttcgtcccaggtgaatattcattaaagaatgctactggccttggtttaattgtgacttctacagggatattaatattacttcactactatgtgtttagtacagcgattggattaacctccttcgtcattgccatattggttattcaggtgatagcctatatcctcgctgtggttggactgagtctctgtattgcggcgtgtataccaatgcatggccctcttctgatttcaggtttgagtatcttagctctagcacaattacttggactagtttatatgaaatttgtggcttccaatcagaagactatacaacctcctaggaaagctgtagaggaaccccttaatgcattcaaagaatcaaaaggaatgatgaatgatgaatgagcggccgcgtcgagtctagagggcccgtttaaacccgctgatcagcctcgactgtgccttctagttgccagccatctgttgtttgcccctcccccgtgccttccttgaccctggaaggtgccactcccactgtcctttcctaataaaatgaggaaattgcatcgcattgtctgagtaggtgtcattctattctggggggtggggtggggcaggacagcaagggggaggattgggaagacaatagcaggcatgctggggatgcggtgggctctatggatttggctacagcaacagggtggtggacctcatggcccacatggcctccaaggagtaagacccctggaccaccagccccagcaagagcacaagaggaagagagagaccctcactgctggggagtccctgccacactcagtcccccaccacactgaatctcccctcctcacagttgccatgtagaccccttgaagaggggaggggcctagggagccgcaccttgtcatgtaccatcaataaagtaccctgtgctcaaccagttacttgtcctgtcttattctagggtctggggcagaggggagggaagctgggcttgtgtcaaggtgagacattcttgctggggagggacctggtatgttctcctcagactgagggtagggcctccaaacagccttgcttgcttcgagaaccatttgcttcccgctcagacgtcttgagtgctacaggaagctggcaccactacttcagagaacaaggccttttcctctcctcgctccagt

SEQ ID NO: 49 - DNA, 2142 bp, Artificial Sequence
  Description of Artificial Sequence: Synthetic polynucleotide
ctgaccacagctctgcaagcagacttccatttacagtgaggaggtgagcattgcattgaacaaaagatggcgttttcacttggaattagttatctgaagctttaggattcctcagcaatatgattatgagacaagaaaggaagattcagaaatgagtctagttgaaggcagcaattcagagaagaagattcagttgttatcattgccgtcctgcttggtttatggcctggttcaggaccaaggagagaagtgtgaatacatgcctcttgagctatagaatgagacgctggagtcactaagatgattttttaaaagtattgttttataaacaaaaataagattgtgacaagggattccactattaatgttttcatgcctgtgccttaatctgactgggtatggtgagaattgtgcttgcagctttaaggtaagaattttaccatcttaatatgttaagaagtgccatttcagtctctcatctctactccaacttgtcttcttaggggctaaagtgcgggccgagatctacgaggccttcgagaatatctaccccatcctgaagggcttcagaaagaccaccggaagcggagctactaacttcagcctgctgaagcaggctggagacgtggaggagaaccctggacctatggtgagcaagggcgaggagctgttcaccggggtggtgcccatcctggtcgagctggacggcgacgtaaacggccacaagttcagcgtgtccggcgagggcgagggcgatgccacctacggcaagctgaccctgaagttcatctgcaccaccggcaagctgcccgtgccctggcccaccctcgtgaccaccctgacctacggcgtgcagtgcttcagccgctaccccgaccacatgaagcagcacgacttcttcaagtccgccatgcccgaaggctacgtccaggagcgcaccatcttcttcaaggacgacggcaactacaagacccgcgccgaggtgaagttcgagggcgacaccctggtgaaccgcatcgagctgaagggcatcgacttcaaggaggacggcaacatcctggggcacaagctggagtacaactacaacagccacaacgtctatatcatggccgacaagcagaagaacggcatcaaggtgaacttcaagatccgccacaacatcgaggacggcagcgtgcagctcgccgaccactaccagcagaacacccccatcggcgacggccccgtgctgctgcccgacaaccactacctgagcacccagtccgccctgagcaaagaccccaacgagaagcgcgatcacatggtcctgctggagttcgtgaccgccgccgggatcactctcggcatggacgagctgtacaagtgagcggccgcgtcgagtctagagggcccgtttaaacccgctgatcagcctcgactgtgccttctagttgccagccatctgttgtttgcccctcccccgtgccttccttgaccctggaaggtgccactcccactgtcctttcctaataaaatgaggaaattgcatcgcattgtctgagtaggtgtcattctattctggggggtggggtggggcaggacagcaagggggaggattgggaagacaatagcaggcatgctggggatgcggtgggctctatggtaggtgctaaagtcagagcagaaatttatgaagcatttgaaaacatctaccctattctaaagggattcaggaagacgacgtaatggctctcatgtacccttgcctcccccacccccttctttttttttttttaaacaaatcagtttgttttggtacctttaaatggtggtgttgtgagaagatggatgttgagttgcagggtgtggcaccaggtgatgcccttctgtaagtgcccaccgcgggatgccgggaaggggcattatttgtgcactgagaacaccgcgcagcgtgactgtgagttgctcataccgtgctgctatctgggcagcgctgcccatttatttatatgtagattttaaacactgctgttgacaagttggtttgagggagaaaactttaagtgttaaagccacctctataattgattggactttttaattttaatgtttttccccatgaaccacagtttttatatttctaccagaaaagtaaaaatcttt

SEQ ID NO: 50 - DNA, 2083 bp, Artificial Sequence
  Description of Artificial Sequence: Synthetic polynucleotide
acaaaagatggcgttttcacttggaattagttatctgaagctttaggattcctcagcaatatgattatgagacaagaaaggaagattcagaaatgagtctagttgaaggcagcaattcagagaagaagattcagttgttatcattgccgtcctgcttggtttatggcctggttcaggaccaaggagagaagtgtgaatacatgcctcttgagctatagaatgagacgctggagtcactaagatgattttttaaaagtattgttttataaacaaaaataagattgtgacaagggattccactattaatgttttcatgcctgtgccttaatctgactgggtatggtgagaattgtgcttgcagctttaaggtaagaattttaccatcttaatatgttaagaagtgccatttcagtctctcatctctactccaacttgtcttcttaggtgctaaagtcagagcagaaatttatgaagcattcgagaacatctaccctattctaaagggattcaggaagacgacgggaagcggagctactaacttcagcctgctgaagcaggctggagacgtggaggagaaccctggacctatggtgagcaagggcgaggagctgttcaccggggtggtgcccatcctggtcgagctggacggcgacgtaaacggccacaagttcagcgtgtccggcgagggcgagggcgatgccacctacggcaagctgaccctgaagttcatctgcaccaccggcaagctgcccgtgccctggcccaccctcgtgaccaccctgacctacggcgtgcagtgcttcagccgctaccccgaccacatgaagcagcacgacttcttcaagtccgccatgcccgaaggctacgtccaggagcgcaccatcttcttcaaggacgacggcaactacaagacccgcgccgaggtgaagttcgagggcgacaccctggtgaaccgcatcgagctgaagggcatcgacttcaaggaggacggcaacatcctggggcacaagctggagtacaactacaacagccacaacgtctatatcatggccgacaagcagaagaacggcatcaaggtgaacttcaagatccgccacaacatcgaggacggcagcgtgcagctcgccgaccactaccagcagaacacccccatcggcgacggccccgtgctgctgcccgacaaccactacctgagcacccagtccgccctgagcaaagaccccaacgagaagcgcgatcacatggtcctgctggagttcgtgaccgccgccgggatcactctcggcatggacgagctgtacaagtgagcggccgcgtcgagtctagagggcccgtttaaacccgctgatcagcctcgactgtgccttctagttgccagccatctgttgtttgcccctcccccgtgccttccttgaccctggaaggtgccactcccactgtcctttcctaataaaatgaggaaattgcatcgcattgtctgagtaggtgtcattctattctggggggtggggtggggcaggacagcaagggggaggattgggaagacaatagcaggcatgctggggatgcggtgggctctatggaagggattcaggaagacgacgtaatggctctcatgtacccttgcctcccccacccccttctttttttttttttaaacaaatcagtttgttttggtacctttaaatggtggtgttgtgagaagatggatgttgagttgcagggtgtggcaccaggtgatgcccttctgtaagtgcccaccgcgggatgccgggaaggggcattatttgtgcactgagaacaccgcgcagcgtgactgtgagttgctcataccgtgctgctatctgggcagcgctgcccatttatttatatgtagattttaaacactgctgttgacaagttggtttgagggagaaaactttaagtgttaaagccacctctataattgattggactttttaattttaatgtttttccccatgaaccacagtttttatatttctaccagaaaagtaaaaatcttttttaaaagtgttgtttttctaatttataactcctaggggttatttctgtgccagacaca

SEQ ID NO: 51 - DNA, 2084 bp, Artificial Sequence
  Description of Artificial Sequence: Synthetic polynucleotide
ggcccgggggactccacatggtggcaggcagtggcatcagcaagacactctctccctcacagaacgtgaagctccctgacgcctatgagcgcctcatcctggacgtcttctgcgggagccagatgcacttcgtgcgcaggtgaggcccagctgccggcccctgcatacctgtgggctatggggtggcctttgccctccctccctgtgtgccaccggcctcccaagccataccatgtcccctcagcgacgagctccgtgaggcctggcgtattttcaccccactgctgcaccagattgagctggagaagcccaagcccatcccctatatttatggcaggtgaggaaagggtgggggctggggacagagcccagcgggcaggggcggggtgagggtggagctacctcatgcctctcctccacccgtcactctccagccgaggccccacggaggcagacgagctgatgaagagagtgggcttccagtacgagggaacctacaaatgggtcaaccctcacaagctgggaagcggagctactaacttcagcctgctgaagcaggctggagacgtggaggagaaccctggacctatggtgagcaagggcgaggagctgttcaccggggtggtgcccatcctggtcgagctggacggcgacgtaaacggccacaagttcagcgtgtccggcgagggcgagggcgatgccacctacggcaagctgaccctgaagttcatctgcaccaccggcaagctgcccgtgccctggcccaccctcgtgaccaccctgacctacggcgtgcagtgcttcagccgctaccccgaccacatgaagcagcacgacttcttcaagtccgccatgcccgaaggctacgtccaggagcgcaccatcttcttcaaggacgacggcaactacaagacccgcgccgaggtgaagttcgagggcgacaccctggtgaaccgcatcgagctgaagggcatcgacttcaaggaggacggcaacatcctggggcacaagctggagtacaactacaacagccacaacgtctatatcatggccgacaagcagaagaacggcatcaaggtgaacttcaagatccgccacaacatcgaggacggcagcgtgcagctcgccgaccactaccagcagaacacccccatcggcgacggccccgtgctgctgcccgacaaccactacctgagcacccagtccgccctgagcaaagaccccaacgagaagcgcgatcacatggtcctgctggagttcgtgaccgccgccgggatcactctcggcatggacgagctgtacaagtgagcggccgcgtcgagtctagagggcccgtttaaacccgctgatcagcctcgactgtgccttctagttgccagccatctgttgtttgcccctcccccgtgccttccttgaccctggaaggtgccactcccactgtcctttcctaataaaatgaggaaattgcatcgcattgtctgagtaggtgtcattctattctggggggtggggtggggcaggacagcaagggggaggattgggaagacaatagcaggcatgctggggatgcggtgggctctatgggtgggtgaacccccacaagctctgagccctgggcacccacctccacccccgccacggccaccctccttcccgccgcccgaccccgagtcgggaggactccgggaccattgacctcagctgcacattcctggccccgggctctggccaccctggcccgcccctcgctgctgctactacccgagcccagctacattcctcagctgccaagcactcgagaccatcctggcccctccagaccctgcctgagcccaggagctgagtcacctcctccactcactccagcccaacagaaggaaggaggagggcgcccattcgtctgtcccagagcttattggccactgggtctcactcctgagtggggccagggtgggagggagggacgagggggaggaaaggggcgagcacccacgtgagagaatctgcctgtggccttgcccgccagcctcagtgccacttgacattccttgtcaccagcaacatctcgagccccctggatgtcc

SEQ ID NO: 52 - DNA, 2149 bp, Artificial Sequence
  Description of Artificial Sequence: Synthetic polynucleotide
ccagggggctgtagtggggccaggctggacctctgtgccctgagcatggctttcttgtttttcagttttggaactccccaaagagctgtcagaaatctttgatcccacacgaggtaggctgctgcattcctccctgaggctaggggtaagggacacagctcattgggtcctatggctgttttcttgcccttttgaggaccttgttgtggcgcttatggtaactggggcaaagggtgaagttcctgatgggcaggtggggttccctttcctgggctttggtgggtggagaggtgggagctggaatgttagtaactgagctccctccattcccagagtgcatgagctcggagctgctggaggagttgatgtcctcagaaggtgggtggccctggaaggtgggagtgggtgtgggcaggggttgggctgctgctaggggagccctggcccagggcctgagactagtgctctctgcagtgttcgcccctctgctgagactttctcctcctcctggcgaccacgactacatctacaacctggacgagagcgagggcgtgtgcgacctgtttgatgtgcccgtgctgaacctgggaagcggagctactaacttcagcctgctgaagcaggctggagacgtggaggagaaccctggacctatggtgagcaagggcgaggagctgttcaccggggtggtgcccatcctggtcgagctggacggcgacgtaaacggccacaagttcagcgtgtccggcgagggcgagggcgatgccacctacggcaagctgaccctgaagttcatctgcaccaccggcaagctgcccgtgccctggcccaccctcgtgaccaccctgacctacggcgtgcagtgcttcagccgctaccccgaccacatgaagcagcacgacttcttcaagtccgccatgcccgaaggctacgtccaggagcgcaccatcttcttcaaggacgacggcaactacaagacccgcgccgaggtgaagttcgagggcgacaccctggtgaaccgcatcgagctgaagggcatcgacttcaaggaggacggcaacatcctggggcacaagctggagtacaactacaacagccacaacgtctatatcatggccgacaagcagaagaacggcatcaaggtgaacttcaagatccgccacaacatcgaggacggcagcgtgcagctcgccgaccactaccagcagaacacccccatcggcgacggccccgtgctgctgcccgacaaccactacctgagcacccagtccgccctgagcaaagaccccaacgagaagcgcgatcacatggtcctgctggagttcgtgaccgccgccgggatcactctcggcatggacgagctgtacaagtgagcggccgcgtcgagtctagagggcccgtttaaacccgctgatcagcctcgactgtgccttctagttgccagccatctgttgtttgcccctcccccgtgccttccttgaccctggaaggtgccactcccactgtcctttcctaataaaatgaggaaattgcatcgcattgtctgagtaggtgtcattctattctggggggtggggtggggcaggacagcaagggggaggattgggaagacaatagcaggcatgctggggatgcggtgggctctatggccacccccgggagaccacgattatatctacaacctggacgagagtgaaggtgtctgtgacctctttgatgtgcctgttctcaacctctgactgacagggacatgccctgtgtggctgggacccagactgtctgacctgggggttgcctggggacctctcccacccgacccctacagagcttgagagccacagacgcctggcttctccggcctcccctcaccgcacagttctggccacagctcccgctcctgtgctggcacttctgtgctcgcagagcaggggaacaggactcagcccccatcaccgtggagccaaagtgtttgcttctccctttctgcggccttcgccagcccaggctcggctgccacccagtggcacagaaccgaggagctgccattaccccccatagggggcagtgtcttgttcctgccagcctcagtgtcttgcttctgccagctccttcccctaggagggaagggtggggtggaactgggcacatg

SEQ ID NO: 53 - DNA, 2130 bp, Artificial Sequence
  Description of Artificial Sequence: Synthetic polynucleotide
ccaggctggacctctgtgccctgagcatggctttcttgtttttcagttttggaactccccaaagagctgtcagaaatctttgatcccacacgaggtaggctgctgcattcctccctgaggctaggggtaagggacacagctcattgggtcctatggctgttttcttgcccttttgaggaccttgttgtggcgcttatggtaactggggcaaagggtgaagttcctgatgggcaggtggggttccctttcctgggctttggtgggtggagaggtgggagctggaatgttagtaactgagctccctccattcccagagtgcatgagctcggagctgctggaggagttgatgtcctcagaaggtgggtggccctggaaggtgggagtgggtgtgggcaggggttgggctgctgctaggggagccctggcccagggcctgagactagtgctctctgcagtgtttgcccctctgcttcgtcttagtcctcctccgggcgaccacgactacatctacaacctggacgagagcgagggcgtgtgcgacctgtttgatgtgcccgtgctgaacctgggaagcggagctactaacttcagcctgctgaagcaggctggagacgtggaggagaaccctggacctatggtgagcaagggcgaggagctgttcaccggggtggtgcccatcctggtcgagctggacggcgacgtaaacggccacaagttcagcgtgtccggcgagggcgagggcgatgccacctacggcaagctgaccctgaagttcatctgcaccaccggcaagctgcccgtgccctggcccaccctcgtgaccaccctgacctacggcgtgcagtgcttcagccgctaccccgaccacatgaagcagcacgacttcttcaagtccgccatgcccgaaggctacgtccaggagcgcaccatcttcttcaaggacgacggcaactacaagacccgcgccgaggtgaagttcgagggcgacaccctggtgaaccgcatcgagctgaagggcatcgacttcaaggaggacggcaacatcctggggcacaagctggagtacaactacaacagccacaacgtctatatcatggccgacaagcagaagaacggcatcaaggtgaacttcaagatccgccacaacatcgaggacggcagcgtgcagctcgccgaccactaccagcagaacacccccatcggcgacggccccgtgctgctgcccgacaaccactacctgagcacccagtccgccctgagcaaagaccccaacgagaagcgcgatcacatggtcctgctggagttcgtgaccgccgccgggatcactctcggcatggacgagctgtacaagtgagcggccgcgtcgagtctagagggcccgtttaaacccgctgatcagcctcgactgtgccttctagttgccagccatctgttgtttgcccctcccccgtgccttccttgaccctggaaggtgccactcccactgtcctttcctaataaaatgaggaaattgcatcgcattgtctgagtaggtgtcattctattctggggggtggggtggggcaggacagcaagggggaggattgggaagacaatagcaggcatgctggggatgcggtgggctctatggattatatctacaacctggacgagagtgaaggtgtctgtgacctctttgatgtgcctgttctcaacctctgactgacagggacatgccctgtgtggctgggacccagactgtctgacctgggggttgcctggggacctctcccacccgacccctacagagcttgagagccacagacgcctggcttctccggcctcccctcaccgcacagttctggccacagctcccgctcctgtgctggcacttctgtgctcgcagagcaggggaacaggactcagcccccatcaccgtggagccaaagtgtttgcttctccctttctgcggccttcgccagcccaggctcggctgccacccagtggcacagaaccgaggagctgccattaccccccatagggggcagtgtcttgttcctgccagcctcagtgtcttgcttctgccagctccttcccctaggagggaagggtggggtggaactgggcacatgccagcaccacttctagctt

SEQ ID NO: 54 - DNA, 2062 bp, Artificial Sequence
  Description of Artificial Sequence: Synthetic polynucleotide
gtcagaaatctttgatcccacacgaggtaggctgctgcattcctccctgaggctaggggtaagggacacagctcattgggtcctatggctgttttcttgcccttttgaggaccttgttgtggcgcttatggtaactggggcaaagggtgaagttcctgatgggcaggtggggttccctttcctgggctttggtgggtggagaggtgggagctggaatgttagtaactgagctccctccattcccagagtgcatgagctcggagctgctggaggagttgatgtcctcagaaggtgggtggccctggaaggtgggagtgggtgtgggcaggggttgggctgctgctaggggagccctggcccagggcctgagactagtgctctctgcagtgtttgcccctctgcttcgtctttctccacccccgggagaccacgattatatctacaacctggacgagagtgaaggtgtctgtgacctcttcgacgtgcccgtgctcaacctcggaagcggagctactaacttcagcctgctgaagcaggctggagacgtggaggagaaccctggacctatggtgagcaagggcgaggagctgttcaccggggtggtgcccatcctggtcgagctggacggcgacgtaaacggccacaagttcagcgtgtccggcgagggcgagggcgatgccacctacggcaagctgaccctgaagttcatctgcaccaccggcaagctgcccgtgccctggcccaccctcgtgaccaccctgacctacggcgtgcagtgcttcagccgctaccccgaccacatgaagcagcacgacttcttcaagtccgccatgcccgaaggctacgtccaggagcgcaccatcttcttcaaggacgacggcaactacaagacccgcgccgaggtgaagttcgagggcgacaccctggtgaaccgcatcgagctgaagggcatcgacttcaaggaggacggcaacatcctggggcacaagctggagtacaactacaacagccacaacgtctatatcatggccgacaagcagaagaacggcatcaaggtgaacttcaagatccgccacaacatcgaggacggcagcgtgcagctcgccgaccactaccagcagaacacccccatcggcgacggccccgtgctgctgcccgacaaccactacctgagcacccagtccgccctgagcaaagaccccaacgagaagcgcgatcacatggtcctgctggagttcgtgaccgccgccgggatcactctcggcatggacgagctgtacaagtgagcggccgcgtcgagtctagagggcccgtttaaacccgctgatcagcctcgactgtgccttctagttgccagccatctgttgtttgcccctcccccgtgccttccttgaccctggaaggtgccactcccactgtcctttcctaataaaatgaggaaattgcatcgcattgtctgagtaggtgtcattctattctggggggtggggtggggcaggacagcaagggggaggattgggaagacaatagcaggcatgctggggatgcggtgggctctatggtgactgacagggacatgccctgtgtggctgggacccagactgtctgacctgggggttgcctggggacctctcccacccgacccctacagagcttgagagccacagacgcctggcttctccggcctcccctcaccgcacagttctggccacagctcccgctcctgtgctggcacttctgtgctcgcagagcaggggaacaggactcagcccccatcaccgtggagccaaagtgtttgcttctccctttctgcggccttcgccagcccaggctcggctgccacccagtggcacagaaccgaggagctgccattaccccccatagggggcagtgtcttgttcctgccagcctcagtgtcttgcttctgccagctccttcccctaggagggaagggtggggtggaactgggcacatgccagcaccacttctagcttccttcgctatcccccaccccctgaccctccagctcctcctggccctctcacgtgcccacttctgctgg

SEQ ID NO: 55 - DNA, 2188 bp, Artificial Sequence
  Description of Artificial Sequence: Synthetic polynucleotide
agagcagggtttcttgacagcagtgctattggcattttaaactggataattctttgttgtgatgggctttcctgtggactgtactatgttggtacacaagaaaaacagtgtactatgtgaatactcactcaaagccagtagcactccctgattgtaacaccaaaaaagtctctcagcattgccaaatgtcccctgtggcagcagaatcactccctgatgagaaccactaccctggagtaaaatctataactatgtcttagaaaataacacagaaaattaatatttctttcactctactccttccattagtgatcaaataaagaaggcatttggcgctacttgccaaattgttggctcaaacttgtgctgaaccttttttggttttctacacttaagtttttttgcctataacccagagaactttgaaaatagagtgtagttaatgtgtatctaatgttactttgtattgacttaatttaccggcctttaatccacagcataagaagtcccacggcaaggacaaagagaaccggggcatcaacacactggaacggtccaaggtcgaggaaacaaccgagcacctggtcaccaagagcagactgcctctgagagcccagatcaacctgggaagcggagctactaacttcagcctgctgaagcaggctggagacgtggaggagaaccctggacctatggtgagcaagggcgaggagctgttcaccggggtggtgcccatcctggtcgagctggacggcgacgtaaacggccacaagttcagcgtgtccggcgagggcgagggcgatgccacctacggcaagctgaccctgaagttcatctgcaccaccggcaagctgcccgtgccctggcccaccctcgtgaccaccctgacctacggcgtgcagtgcttcagccgctaccccgaccacatgaagcagcacgacttcttcaagtccgccatgcccgaaggctacgtccaggagcgcaccatcttcttcaaggacgacggcaactacaagacccgcgccgaggtgaagttcgagggcgacaccctggtgaaccgcatcgagctgaagggcatcgacttcaaggaggacggcaacatcctggggcacaagctggagtacaactacaacagccacaacgtctatatcatggccgacaagcagaagaacggcatcaaggtgaacttcaagatccgccacaacatcgaggacggcagcgtgcagctcgccgaccactaccagcagaacacccccatcggcgacggccccgtgctgctgcccgacaaccactacctgagcacccagtccgccctgagcaaagaccccaacgagaagcgcgatcacatggtcctgctggagttcgtgaccgccgccgggatcactctcggcatggacgagctgtacaagtgagcggccgcgtcgagtctagagggcccgtttaaacccgctgatcagcctcgactgtgccttctagttgccagccatctgttgtttgcccctcccccgtgccttccttgaccctggaaggtgccactcccactgtcctttcctaataaaatgaggaaattgcatcgcattgtctgagtaggtgtcattctattctggggggtggggtggggcaggacagcaagggggaggattgggaagacaatagcaggcatgctggggatgcggtgggctctatggaaaaaatcacatggaaaagacaaagaaaacagaggcattaacacactggagaggtctaaagtggaagaaactacagagcacttggttacaaagagcagattacctctgcgagcccagatcaacctttaattcacttgggggttggcaattttatttttaaagaaaacttaaaaataaaacctgaaaccccagaacttgagccttgtgtatagattttaaaagaatatatatatcagccgggcgcggtggctcatgcctgtaatcccagcactttgggaggctgaggcgggtggattgcttgagcccaggagtttgagaccagcctggccaacgtggcaaaacctcgtctctgttaaaaattagccgggcgtggtggcacactcctgtaatcccagctactggggaggctgaggcacgagaatcacttgaacccaggaagcggggttgcagtgagccaaaggtacaccactacactccagcctgggcaacagagcaagact

SEQ ID NO: 56 - DNA, 2120 bp, Artificial Sequence
  Description of Artificial Sequence: Synthetic polynucleotide
ttcctgtggactgtactatgttggtacacaagaaaaacagtgtactatgtgaatactcactcaaagccagtagcactccctgattgtaacaccaaaaaagtctctcagcattgccaaatgtcccctgtggcagcagaatcactccctgatgagaaccactaccctggagtaaaatctataactatgtcttagaaaataacacagaaaattaatatttctttcactctactccttccattagtgatcaaataaagaaggcatttggcgctacttgccaaattgttggctcaaacttgtgctgaaccttttttggttttctacacttaagtttttttgcctataacccagagaactttgaaaatagagtgtagttaatgtgtatctaatgttactttgtattgacttaattttcccgccttaaatccacagcataaaaaatcacatggaaaagacaaagaaaacagaggcattaacacactggagaggtctaaagtggaagaaacaaccgagcacctggtcaccaagagcagactgcctctgagagcccagatcaacctgggaagcggagctactaacttcagcctgctgaagcaggctggagacgtggaggagaaccctggacctatggtgagcaagggcgaggagctgttcaccggggtggtgcccatcctggtcgagctggacggcgacgtaaacggccacaagttcagcgtgtccggcgagggcgagggcgatgccacctacggcaagctgaccctgaagttcatctgcaccaccggcaagctgcccgtgccctggcccaccctcgtgaccaccctgacctacggcgtgcagtgcttcagccgctaccccgaccacatgaagcagcacgacttcttcaagtccgccatgcccgaaggctacgtccaggagcgcaccatcttcttcaaggacgacggcaactacaagacccgcgccgaggtgaagttcgagggcgacaccctggtgaaccgcatcgagctgaagggcatcgacttcaaggaggacggcaacatcctggggcacaagctggagtacaactacaacagccacaacgtctatatcatggccgacaagcagaagaacggcatcaaggtgaacttcaagatccgccacaacatcgaggacggcagcgtgcagctcgccgaccactaccagcagaacacccccatcggcgacggccccgtgctgctgcccgacaaccactacctgagcacccagtccgccctgagcaaagaccccaacgagaagcgcgatcacatggtcctgctggagttcgtgaccgccgccgggatcactctcggcatggacgagctgtacaagtgagcggccgcgtcgagtctagagggcccgtttaaacccgctgatcagcctcgactgtgccttctagttgccagccatctgttgtttgcccctcccccgtgccttccttgaccctggaaggtgccactcccactgtcctttcctaataaaatgaggaaattgcatcgcattgtctgagtaggtgtcattctattctggggggtggggtggggcaggacagcaagggggaggattgggaagacaatagcaggcatgctggggatgcggtgggctctatggaactacagagcacttggctacatagagcagattacctctgcgagcccagatcaacctttaattcacttgggggttggcaattttatttttaaagaaaacttaaaaataaaacctgaaaccccagaacttgagccttgtgtatagattttaaaagaatatatatatcagccgggcgcggtggctcatgcctgtaatcccagcactttgggaggctgaggcgggtggattgcttgagcccaggagtttgagaccagcctggccaacgtggcaaaacctcgtctctgttaaaaattagccgggcgtggtggcacactcctgtaatcccagctactggggaggctgaggcacgagaatcacttgaacccaggaagcggggttgcagtgagccaaaggtacaccactacactccagcctgggcaacagagcaagactcggtctcaaaaacaaaatttaaaaaagatataaggcagtactgtaaattcagttgaattttgatatct

SEQ ID NO: 57 - DNA, 2152 bp, Artificial Sequence
  Description of Artificial Sequence: Synthetic polynucleotide
ttaaactggataattctttgttgtgatgggctttcctgtggactgtactatgttggtacacaagaaaaacagtgtactatgtgaatactcactcaaagccagtagcactccctgattgtaacaccaaaaaagtctctcagcattgccaaatgtcccctgtggcagcagaatcactccctgatgagaaccactaccctggagtaaaatctataactatgtcttagaaaataacacagaaaattaatatttctttcactctactccttccattagtgatcaaataaagaaggcatttggcgctacttgccaaattgttggctcaaacttgtgctgaaccttttttggttttctacacttaagtttttttgcctataacccagagaactttgaaaatagagtgtagttaatgtgtatctaatgttactttgtattgacttaattttcccgccttaaatccacagcataaaaaatcacatggaaaagacaaagaaaacagaggcatcaacacactggaacggtccaaggtcgaggaaacaaccgagcacctggtcaccaagagcagactgcctctgagagcccagatcaacctgggaagcggagctactaacttcagcctgctgaagcaggctggagacgtggaggagaaccctggacctatggtgagcaagggcgaggagctgttcaccggggtggtgcccatcctggtcgagctggacggcgacgtaaacggccacaagttcagcgtgtccggcgagggcgagggcgatgccacctacggcaagctgaccctgaagttcatctgcaccaccggcaagctgcccgtgccctggcccaccctcgtgaccaccctgacctacggcgtgcagtgcttcagccgctaccccgaccacatgaagcagcacgacttcttcaagtccgccatgcccgaaggctacgtccaggagcgcaccatcttcttcaaggacgacggcaactacaagacccgcgccgaggtgaagttcgagggcgacaccctggtgaaccgcatcgagctgaagggcatcgacttcaaggaggacggcaacatcctggggcacaagctggagtacaactacaacagccacaacgtctatatcatggccgacaagcagaagaacggcatcaaggtgaacttcaagatccgccacaacatcgaggacggcagcgtgcagctcgccgaccactaccagcagaacacccccatcggcgacggccccgtgctgctgcccgacaaccactacctgagcacccagtccgccctgagcaaagaccccaacgagaagcgcgatcacatggtcctgctggagttcgtgaccgccgccgggatcactctcggcatggacgagctgtacaagtgagcggccgcgtcgagtctagagggcccgtttaaacccgctgatcagcctcgactgtgccttctagttgccagccatctgttgtttgcccctcccccgtgccttccttgaccctggaaggtgccactcccactgtcctttcctaataaaatgaggaaattgcatcgcattgtctgagtaggtgtcattctattctggggggtggggtggggcaggacagcaagggggaggattgggaagacaatagcaggcatgctggggatgcggtgggctctatggattaacacactggagagttctgaagtggaagaaactacagagcacttggttacaaagagcagattacctctgcgagcccagatcaacctttaattcacttgggggttggcaattttatttttaaagaaaacttaaaaataaaacctgaaaccccagaacttgagccttgtgtatagattttaaaagaatatatatatcagccgggcgcggtggctcatgcctgtaatcccagcactttgggaggctgaggcgggtggattgcttgagcccaggagtttgagaccagcctggccaacgtggcaaaacctcgtctctgttaaaaattagccgggcgtggtggcacactcctgtaatcccagctactggggaggctgaggcacgagaatcacttgaacccaggaagcggggttgcagtgagccaaaggtacaccactacactccagcctgggcaacagagcaagactcggtctcaaaaacaaaatttaaaaaagatataaggc

SEQ ID NO: 58 - protein, 1334 aa, Artificial Sequence
  Description of Artificial Sequence: Synthetic polypeptide
MGHHHHHHGSTQFEGFTNLYQVSKTLRFELIPQGKTLKHIQEQGFIEEDKARNDHYKELKPIIDRIYKTYADQCLQLVQLDWENLSAAIDSYRKEKTEETRNALIEEQATYRNAIHDYFIGRTDNLTDAINKRHAEIYKGLFKAELFNGKVLKQLGTVTTTEHENALLRSFDKFTTYFSGFYENRKNVFSAEDISTAIPHRIVQDNFPKFKENCHIFTRLITAVPSLREHFENVKKAIGIFVSTSIEEVFSFPFYNQLLTQTQIDLYNQLLGGISREAGTEKIKGLNEVLNLAIQKNDETAHIIASLPHRFIPLFKQILSDRNTLSFILEEFKSDEEVIQSFCKYKTLLRNENVLETAEALFNELNSIDLTHIFISHKKLETISSALCDHWDTLRNALYERRISELTGKITKSAKEKVQRSLKHEDINLQEIISAAGKELSEAFKQKTSEILSHAHAALDQPLPTTLKKQEEKEILKSQLDSLLGLYHLLDWFAVDESNEVDPEFSARLTGIKLEMEPSLSFYNKARNYATKKPYSVEKFKLNFQMPTLASGWDVNKEKNNGAILFVKNGLYYLGIMPKQKGRYKALSFEPTEKTSEGFDKMYYDYFPDAAKMIPKCSTQLKAVTAHFQTHTTPILLSNNFIEPLEITKEIYDLNNPEKEPKKFQTAYAKKTGDQKGYREALCKWIDFTRDFLSKYTKTTSIDLSSLRPSSQYKDLGEYYAELNPLLYHISFQRIAEKEIMDAVETGKLYLFQIYNKDFAKGHHGKPNLHTLYWTGLFSPENLAKTSIKLNGQAELFYRPKSRMKRMAARLGEKMLNKKLKDQKTPIPDTLYQELYDYVNHRLSHDLSDEARALLPNVITKEVSHEIIKDRRFTSDKFFFHVPITLNYQAANSPSKFNQRVNAYLKEHPETPIIGIDRGERNLIYITVIDSTGKILEQRSLNTIQQFDYQKKLDNREKERVAARQAWSVVGTIKDLKQGYLSQVIHEIVDLMIHYQAVVVLENLNFGFKSKRTGIAEKAVYQQFEKMLIDKLNCLVLKDYPAEKVGGVLNPYQLTDQFTSFAKMGTQSGFLFYVPAPYTSKIDPLTGFVDPFVWKTIKNHESRKHFLEGFDFLHYDVKTGDFILHFKMNRNLSFQRGLPGFMPAWDIVFEKNETQFDAKGTPFIAGKRIVPVIENHRFTGRYRDLYPANELIALLEEKGIVFRDGSNILPKLLENDDSHAIDTMVALIRSVLQMRNSNAATGEDYINSPVRDLNGVCFDSRFQNPEWPMDADANGAYHIALKGQLLLNHLKESKDLKLQNGISNQDWLAYIQELRNGSPKKKRKVGSPKKKRKV

SEQ ID NO: 59 - protein, 1363 aa, Artificial Sequence
  Description of Artificial Sequence: Synthetic polypeptide
MTQFEGFTNLYQVSKTLRFELIPQGKTLKHIQEQGFIEEDKARNDHYKELKPIIDRIYKTYADQCLQLVQLDWENLSAAIDSYRKEKTEETRNALIEEQATYRNAIHDYFIGRTDNLTDAINKRHAEIYKGLFKAELFNGKVLKQLGTVTTTEHENALLRSFDKFTTYFSGFYENRKNVFSAEDISTAIPHRIVQDNFPKFKENCHIFTRLITAVPSLREHFENVKKAIGIFVSTSIEEVFSFPFYNQLLTQTQIDLYNQLLGGISREAGTEKIKGLNEVLNLAIQKNDETAHIIASLPHRFIPLFKQILSDRNTLSFILEEFKSDEEVIQSFCKYKTLLRNENVLETAEALFNELNSIDLTHIFISHKKLETISSALCDHWDTLRNALYERRISELTGKITKSAKEKVQRSLKHEDINLQEIISAAGKELSEAFKQKTSEILSHAHAALDQPLPTTLKKQEEKEILKSQLDSLLGLYHLLDWFAVDESNEVDPEFSARLTGIKLEMEPSLSFYNKARNYATKKPYSVEKFKLNFQRPTLASGWDVNKEKNNGAILFVKNGLYYLGIMPKQKGRYKALSFEPTEKTSEGFDKMYYDYFPDAAKMIPKCSTQLKAVTAHFQTHTTPILLSNNFIEPLEITKEIYDLNNPEKEPKKFQTAYAKKTGDQKGYREALCKWIDFTRDFLSKYTKTTSIDLSSLRPSSQYKDLGEYYAELNPLLYHISFQRIAEKEIMDAVETGKLYLFQIYNKDFAKGHHGKPNLHTLYWTGLFSPENLAKTSIKLNGQAELFYRPKSRMKRMAHRLGEKMLNKKLKDQKTPIPDTLYQELYDYVNHRLSHDLSDEARALLPNVITKEVSHEIIKDRRFTSDKFLFHVPITLNYQAANSPSKFNQRVNAYLKEHPETPIIGIDRGERNLIYITVIDSTGKILEQRSLNTIQQFDYQKKLDNREKERVAARQAWSVVGTIKDLKQGYLSQVIHEIVDLMIHYQAVVVLENLNFGFKSKRTGIAEKAVYQQFEKMLIDKLNCLVLKDYPAEKVGGVLNPYQLTDQFTSFAKMGTQSGFLFYVPAPYTSKIDPLTGFVDPFVWKTIKNHESRKHFLEGFDFLHYDVKTGDFILHFKMNRNLSFQRGLPGFMPAWDIVFEKNETQFDAKGTPFIAGKRIVPVIENHRFTGRYRDLYPANELIALLEEKGIVFRDGSNILPKLLENDDSHAIDTMVALIRSVLQMRNSNAATGEDYINSPVRDLNGVCFDSRFQNPEWPMDADANGAYHIALKGQLLLNHLKESKDLKLQNGISNQDWLAYIQELRNGRSSDDEATADSQHAAPPKKKRKVGGSGGSGGSGGSGGSGGSGGSGGSLEHHHHHH

SEQ ID NO: 60 - protein, 1363 aa, Artificial Sequence
  Description of Artificial Sequence: Synthetic polypeptide
MTQFEGFTNLYQVSKTLRFELIPQGKTLKHIQEQGFIEEDKARNDHYKELKPIIDRIYKTYADQCLQLVQLDWENLSAAIDSYRKEKTEETRNALIEEQATYRNAIHDYFIGRTDNLTDAINKRHAEIYKGLFKAELFNGKVLKQLGTVTTTEHENALLRSFDKFTTYFSGFYENRKNVFSAEDISTAIPHRIVQDNFPKFKENCHIFTRLITAVPSLREHFENVKKAIGIFVSTSIEEVFSFPFYNQLLTQTQIDLYNQLLGGISREAGTEKIKGLNEVLNLAIQKNDETAHIIASLPHRFIPLFKQILSDRNTLSFILEEFKSDEEVIQSFCKYKTLLRNENVLETAEALFNELNSIDLTHIFISHKKLETISSALCDHWDTLRNALYERRISELTGKITKSAKEKVQRSLKHEDINLQEIISAAGKELSEAFKQKTSEILSHAHAALDQPLPTTLKKQEEKEILKSQLDSLLGLYHLLDWFAVDESNEVDPEFSARLTGIKLEMEPSLSFYNKARNYATKKPYSVEKFKLNFQMPTLASGWDVNKEKNNGAILFVKNGLYYLGIMPKQKGRYKALSFEPTEKTSEGFDKMYYDYFPDAAKMIPKCSTQLKAVTAHFQTHTTPILLSNNFIEPLEITKEIYDLNNPEKEPKKFQTAYAKKTGDQKGYREALCKWIDFTRDFLSKYTKTTSIDLSSLRPSSQYKDLGEYYAELNPLLYHISFQRIAEKEIMDAVETGKLYLFQIYNKDFAKGHHGKPNLHTLYWTGLFSPENLAKTSIKLNGQAELFYRPKSRMKRMAHRLGEKMLNKKLKDQKTPIPDTLYQELYDYVNHRLSHDLSDEARALLPNVITKEVSHEIIKDRRFTSDKFFFHVPITLNYQAANSPSKFNQRVNAYLKEHPETPIIGIDRGERNLIYITVIDSTGKILEQRSLNTIQQFDYQKKLDNREKERVAARQAWSVVGTIKDLKQGYLSQVIHEIVDLMIHYQAVVVLENLNFGFKSKRTGIAEKAVYQQFEKMLIDKLNCLVLKDYPAEKVGGVLNPYQLTDQFTSFAKMGTQSGFLFYVPAPYTSKIDPLTGFVDPFVWKTIKNHESRKHFLEGFDFLHYDVKTGDFILHFKMNRNLSFQRGLPGFMPAWDIVFEKNETQFDAKGTPFIAGKRIVPVIENHRFTGRYRDLYPANELIALLEEKGIVFRDGSNILPKLLENDDSHAIDTMVALIRSVLQMRNSNAATGEDYINSPVRDLNGVCFDSRFQNPEWPMDADANGAYHIALKGQLLLNHLKESKDLKLQNGISNQDWLAYIQELRNGRSSDDEATADSQHAAPPKKKRKVGGSGGSGGSGGSGGSGGSGGSGGSLEHHHHHH

SEQ ID NO: 61 - protein, 1363 aa, Artificial Sequence
  Description of Artificial Sequence: Synthetic polypeptide
MTQFEGFTNLYQVSKTLRFELIPQGKTLKHIQEQGFIEEDKARNDHYKELKPIIDRIYKTYADQCLQLVQLDWENLSAAIDSYRKEKTEETRNALIEEQATYRNAIHDYFIGRTDNLTDAINKRHAEIYKGLFKAELFNGKVLKQLGTVTTTEHENALLRSFDKFTTYFSGFYENRKNVFSAEDISTAIPHRIVQDNFPKFKENCHIFTRLITAVPSLREHFENVKKAIGIFVSTSIEEVFSFPFYNQLLTQTQIDLYNQLLGGISREAGTEKIKGLNEVLNLAIQKNDETAHIIASLPHRFIPLFKQILSDRNTLSFILEEFKSDEEVIQSFCKYKTLLRNENVLETAEALFNELNSIDLTHIFISHKKLETISSALCDHWDTLRNALYERRISELTGKITKSAKEKVQRSLKHEDINLQEIISAAGKELSEAFKQKTSEILSHAHAALDQPLPTTLKKQEEKEILKSQLDSLLGLYHLLDWFAVDESNEVDPEFSARLTGIKLEMEPSLSFYNKARNYATKKPYSVEKFKLNFQRPTLASGWDVNKEKNNGAILFVKNGLYYLGIMPKQKGRYKALSFEPTEKTSEGFDKMYYDYFPDAAKMIPKCSTQLKAVTAHFQTHTTPILLSNNFIEPLEITKEIYDLNNPEKEPKKFQTAYAKKTGDQKGYREALCKWIDFTRDFLSKYTKTTSIDLSSLRPSSQYKDLGEYYAELNPLLYHISFQRIAEKEIMDAVETGKLYLFQIYNKDFAKGHHGKPNLHTLYWTGLFSPENLAKTSIKLNGQAELFYRPKSRMKRMAARLGEKMLNKKLKDQKTPIPDTLYQELYDYVNHRLSHDLSDEARALLPNVITKEVSHEIIKDRRFTSDKFLFHVPITLNYQAANSPSKFNQRVNAYLKEHPETPIIGIDRGERNLIYITVIDSTGKILEQRSLNTIQQFDYQKKLDNREKERVAARQAWSVVGTIKDLKQGYLSQVIHEIVDLMIHYQAVVVLENLNFGFKSKRTGIAEKAVYQQFEKMLIDKLNCLVLKDYPAEKVGGVLNPYQLTDQFTSFAKMGTQSGFLFYVPAPYTSKIDPLTGFVDPFVWKTIKNHESRKHFLEGFDFLHYDVKTGDFILHFKMNRNLSFQRGLPGFMPAWDIVFEKNETQFDAKGTPFIAGKRIVPVIENHRFTGRYRDLYPANELIALLEEKGIVFRDGSNILPKLLENDDSHAIDTMVALIRSVLQMRNSNAATGEDYINSPVRDLNGVCFDSRFQNPEWPMDADANGAYHIALKGQLLLNHLKESKDLKLQNGISNQDWLAYIQELRNGRSSDDEATADSQHAAPPKKKRKVGGSGGSGGSGGSGGSGGSGGSGGSLEHHHHHH

SEQ ID NO: 62 - protein, 1331 aa, Artificial Sequence
  Description of Artificial Sequence: Synthetic polypeptide
MTQFEGFTNLYQVSKTLRFELIPQGKTLKHIQEQGFIEEDKARNDHYKELKPIIDRIYKTYADQCLQLVQLDWENLSAAIDSYRKEKTEETRNALIEEQATYRNAIHDYFIGRTDNLTDAINKRHAEIYKGLFKAELFNGKVLKQLGTVTTTEHENALLRSFDKFTTYFSGFYENRKNVFSAEDISTAIPHRIVQDNFPKFKENCHIFTRLITAVPSLREHFENVKKAIGIFVSTSIEEVFSFPFYNQLLTQTQIDLYNQLLGGISREAGTEKIKGLNEVLNLAIQKNDETAHIIASLPHRFIPLFKQILSDRNTLSFILEEFKSDEEVIQSFCKYKTLLRNENVLETAEALFNELNSIDLTHIFISHKKLETISSALCDHWDTLRNALYERRISELTGKITKSAKEKVQRSLKHEDINLQEIISAAGKELSEAFKQKTSEILSHAHAALDQPLPTTLKKQEEKEILKSQLDSLLGLYHLLDWFAVDESNEVDPEFSARLTGIKLEMEPSLSFYNKARNYATKKPYSVEKFKLNFQRPTLASGWDVNKEKNNGAILFVKNGLYYLGIMPKQKGRYKALSFEPTEKTSEGFDKMYYDYFPDAAKMIPKCSTQLKAVTAHFQTHTTPILLSNNFIEPLEITKEIYDLNNPEKEPKKFQTAYAKKTGDQKGYREALCKWIDFTRDFLSKYTKTTSIDLSSLRPSSQYKDLGEYYAELNPLLYHISFQRIAEKEIMDAVETGKLYLFQIYNKDFAKGHHGKPNLHTLYWTGLFSPENLAKTSIKLNGQAELFYRPKSRMKRMAARLGEKMLNKKLKDQKTPIPDTLYQELYDYVNHRLSHDLSDEARALLPNVITKEVSHEIIKDRRFTSDKFLFHVPITLNYQAANSPSKFNQRVNAYLKEHPETPIIGIDRGERNLIYITVIDSTGKILEQRSLNTIQQFDYQKKLDNREKERVAARQAWSVVGTIKDLKQGYLSQVIHEIVDLMIHYQAVVVLENLNFGFKSKRTGIAEKAVYQQFEKMLIDKLNCLVLKDYPAEKVGGVLNPYQLTDQFTSFAKMGTQSGFLFYVPAPYTSKIDPLTGFVDPFVWKTIKNHESRKHFLEGFDFLHYDVKTGDFILHFKMNRNLSFQRGLPGFMPAWDIVFEKNETQFDAKGTPFIAGKRIVPVIENHRFTGRYRDLYPANELIALLEEKGIVFRDGSNILPKLLENDDSHAIDTMVALIRSVLQMRNSNAATGEDYINSPVRDLNGVCFDSRFQNPEWPMDADANGAYHIALKGQLLLNHLKESKDLKLQNGISNQDWLAYIQELRNGRSSDDEATADSQHAAPPKKKRKV

SEQ ID NO: 63 - protein, 1331 aa, Artificial Sequence
  Description of Artificial Sequence: Synthetic polypeptide
MTQFEGFTNLYQVSKTLRFELIPQGKTLKHIQEQGFIEEDKARNDHYKELKPIIDRIYKTYADQCLQLVQLDWENLSAAIDSYRKEKTEETRNALIEEQATYRNAIHDYFIGRTDNLTDAINKRHAEIYKGLFKAELFNGKVLKQLGTVTTTEHENALLRSFDKFTTYFSGFYENRKNVFSAEDISTAIPHRIVQDNFPKFKENCHIFTRLITAVPSLREHFENVKKAIGIFVSTSIEEVFSFPFYNQLLTQTQIDLYNQLLGGISREAGTEKIKGLNEVLNLAIQKNDETAHIIASLPHRFIPLFKQILSDRNTLSFILEEFKSDEEVIQSFCKYKTLLRNENVLETAEALFNELNSIDLTHIFISHKKLETISSALCDHWDTLRNALYERRISELTGKITKSAKEKVQRSLKHEDINLQEIISAAGKELSEAFKQKTSEILSHAHAALDQPLPTTLKKQEEKEILKSQLDSLLGLYHLLDWFAVDESNEVDPEFSARLTGIKLEMEPSLSFYNKARNYATKKPYSVEKFKLNFQRPTLASGWDVNKEKNNGAILFVKNGLYYLGIMPKQKGRYKALSFEPTEKTSEGFDKMYYDYFPDAAKMIPKCSTQLKAVTAHFQTHTTPILLSNNFIEPLEITKEIYDLNNPEKEPKKFQTAYAKKTGDQKGYREALCKWIDFTRDFLSKYTKTTSIDLSSLRPSSQYKDLGEYYAELNPLLYHISFQRIAEKEIMDAVETGKLYLFQIYNKDFAKGHHGKPNLHTLYWTGLFSPENLAKTSIKLNGQAELFYRPKSRMKRMAHRLGEKMLNKKLKDQKTPIPDTLYQELYDYVNHRLSHDLSDEARALLPNVITKEVSHEIIKDRRFTSDKFLFHVPITLNYQAANSPSKFNQRVNAYLKEHPETPIIGIDRGERNLIYITVIDSTGKILEQRSLNTIQQFDYQKKLDNREKERVAARQAWSVVGTIKDLKQGYLSQVIHEIVDLMIHYQAVVVLENLNFGFKSKRTGIAEKAVYQQFEKMLIDKLNCLVLKDYPAEKVGGVLNPYQLTDQFTSFAKMGTQSGFLFYVPAPYTSKIDPLTGFVDPFVWKTIKNHESRKHFLEGFDFLHYDVKTGDFILHFKMNRNLSFQRGLPGFMPAWDIVFEKNETQFDAKGTPFIAGKRIVPVIENHRFTGRYRDLYPANELIALLEEKGIVFRDGSNILPKLLENDDSHAIDTMVALIRSVLQMRNSNAATGEDYINSPVRDLNGVCFDSRFQNPEWPMDADANGAYHIALKGQLLLNHLKESKDLKLQNGISNQDWLAYIQELRNGRSSDDEATADSQHAAPPKKKRKV

SEQ ID NO: 64 - protein, 1363 aa, Artificial Sequence; identical to SEQ ID NO: 59
  Description of Artificial Sequence: Synthetic polypeptide

SEQ ID NO: 65 - protein, 1361 aa, Artificial Sequence
  Description of Artificial Sequence: Synthetic polypeptide
MGRDPGKPIPNPLLGLDSTAPKKKRKVGIHGVPAATQFEGFTNLYQVSKTLRFELIPQGKTLKHIQEQGFIEEDKARNDHYKELKPIIDRIYKTYADQCLQLVQLDWENLSAAIDSYRKEKTEETRNALIEEQATYRNAIHDYFIGRTDNLTDAINKRHAEIYKGLFKAELFNGKVLKQLGTVTTTEHENALLRSFDKFTTYFSGFYENRKNVFSAEDISTAIPHRIVQDNFPKFKENCHIFTRLITAVPSLREHFENVKKAIGIFVSTSIEEVFSFPFYNQLLTQTQIDLYNQLLGGISREAGTEKIKGLNEVLNLAIQKNDETAHIIASLPHRFIPLFKQILSDRNTLSFILEEFKSDEEVIQSFCKYKTLLRNENVLETAEALFNELNSIDLTHIFISHKKLETISSALCDHWDTLRNALYERRISELTGKITKSAKEKVQRSLKHEDINLQEIISAAGKELSEAFKQKTSEILSHAHAALDQPLPTTLKKQEEKEILKSQLDSLLGLYHLLDWFAVDESNEVDPEFSARLTGIKLEMEPSLSFYNKARNYATKKPYSVEKFKLNFQMPTLASGWDVNKEKNNGAILFVKNGLYYLGIMPKQKGRYKALSFEPTEKTSEGFDKMYYDYFPDAAKMIPKCSTQLKAVTAHFQTHTTPILLSNNFIEPLEITKEIYDLNNPEKEPKKFQTAYAKKTGDQKGYREALCKWIDFTRDFLSKYTKTTSIDLSSLRPSSQYKDLGEYYAELNPLLYHISFQRIAEKEIMDAVETGKLYLFQIYNKDFAKGHHGKPNLHTLYWTGLFSPENLAKTSIKLNGQAELFYRPKSRMKRMAHRLGEKMLNKKLKDQKTPIPDTLYQELYDYVNHRLSHDLSDEARALLPNVITKEVSHEIIKDRRFTSDKFFFHVPITLNYQAANSPSKFNQRVNAYLKEHPETPIIGIDRGERNLIYITVIDSTGKILEQRSLNTIQQFDYQKKLDNREKERVAARQAWSVVGTIKDLKQGYLSQVIHEIVDLMIHYQAVVVLENLNFGFKSKRTGIAEKAVYQQFEKMLIDKLNCLVLKDYPAEKVGGVLNPYQLTDQFTSFAKMGTQSGFLFYVPAPYTSKIDPLTGFVDPFVWKTIKNHESRKHFLEGFDFLHYDVKTGDFILHFKMNRNLSFQRGLPGFMPAWDIVFEKNETQFDAKGTPFIAGKRIVPVIENHRFTGRYRDLYPANELIALLEEKGIVFRDGSNILPKLLENDDSHAIDTMVALIRSVLQMRNSNAATGEDYINSPVRDLNGVCFDSRFQNPEWPMDADANGAYHIALKGQLLLNHLKESKDLKLQNGISNQDWLAYIQELRNPKKKRKVKLAAALEHHHHHH

SEQ ID NO: 66 - protein, 1307 aa, Artificial Sequence
  Description of Artificial Sequence: Synthetic polypeptide
MTQFEGFTNLYQVSKTLRFELIPQGKTLKHIQEQGFIEEDKARNDHYKELKPIIDRIYKTYADQCLQLVQLDWENLSAAIDSYRKEKTEETRNALIEEQATYRNAIHDYFIGRTDNLTDAINKRHAEIYKGLFKAELFNGKVLKQLGTVTTTEHENALLRSFDKFTTYFSGFYENRKNVFSAEDISTAIPHRIVQDNFPKFKENCHIFTRLITAVPSLREHFENVKKAIGIFVSTSIEEVFSFPFYNQLLTQTQIDLYNQLLGGISREAGTEKIKGLNEVLNLAIQKNDETAHIIASLPHRFIPLFKQILSDRNTLSFILEEFKSDEEVIQSFCKYKTLLRNENVLETAEALFNELNSIDLTHIFISHKKLETISSALCDHWDTLRNALYERRISELTGKITKSAKEKVQRSLKHEDINLQEIISAAGKELSEAFKQKTSEILSHAHAALDQPLPTTLKKQEEKEILKSQLDSLLGLYHLLDWFAVDESNEVDPEFSARLTGIKLEMEPSLSFYNKARNYATKKPYSVEKFKLNFQMPTLASGWDVNKEKNNGAILFVKNGLYYLGIMPKQKGRYKALSFEPTEKTSEGFDKMYYDYFPDAAKMIPKCSTQLKAVTAHFQTHTTPILLSNNFIEPLEITKEIYDLNNPEKEPKKFQTAYAKKTGDQKGYREALCKWIDFTRDFLSKYTKTTSIDLSSLRPSSQYKDLGEYYAELNPLLYHISFQRIAEKEIMDAVETGKLYLFQIYNKDFAKGHHGKPNLHTLYWTGLFSPENLAKTSIKLNGQAELFYRPKSRMKRMAHRLGEKMLNKKLKDQKTPIPDTLYQELYDYVNHRLSHDLSDEARALLPNVITKEVSHEIIKDRRFTSDKFFFHVPITLNYQAANSPSKFNQRVNAYLKEHPETPIIGIDRGERNLIYITVIDSTGKILEQRSLNTIQQFDYQKKLDNREKERVAARQAWSVVGTIKDLKQGYLSQVIHEIVDLMIHYQAVVVLENLNFGFKSKRTGIAEKAVYQQFEKMLIDKLNCLVLKDYPAEKVGGVLNPYQLTDQFTSFAKMGTQSGFLFYVPAPYTSKIDPLTGFVDPFVWKTIKNHESRKHFLEGFDFLHYDVKTGDFILHFKMNRNLSFQRGLPGFMPAWDIVFEKNETQFDAKGTPFIAGKRIVPVIENHRFTGRYRDLYPANELIALLEEKGIVFRDGSNILPKLLENDDSHAIDTMVALIRSVLQMRNSNAATGEDYINSPVRDLNGVCFDSRFQNPEWPMDADANGAYHIALKGQLLLNHLKESKDLKLQNGISNQDWLAYIQELRN

SEQ ID NO: 67 - RNA, 10 nt, Artificial Sequence
  Description of Artificial Sequence: Synthetic oligonucleotide
aagaccuuuu

SEQ ID NO: 68 - RNA, 25 nt, Artificial Sequence
  Description of Artificial Sequence: Synthetic oligonucleotide
auguguuuuugucaaaagaccuuuu

SEQ ID NO: 69 - RNA, 60 nt, Artificial Sequence
  Description of Artificial Sequence: Synthetic oligonucleotide
aggccagcuugccgguuuuuuagucgugcugcuucauguguuuuugucaaaagaccuuuu

SEQ ID NO: 70 - DNA, 10 bp, Artificial Sequence
  Description of Artificial Sequence: Synthetic oligonucleotide
aagacctttt

SEQ ID NO: 71 - DNA, 25 bp, Artificial Sequence
  Description of Artificial Sequence: Synthetic oligonucleotide
atgtgtttttgtcaaaagacctttt

SEQ ID NO: 72 - DNA, 60 bp, Artificial Sequence
  Description of Artificial Sequence: Synthetic oligonucleotide
aggccagcttgccggttttttagtcgtgctgcttcatgtgtttttgtcaaaagacctttt

SEQ ID NO: 73 - DNA, 20 bp, Artificial Sequence
  Description of Artificial Sequence: Synthetic oligonucleotide
tttttgtcaaaagacctttt

SEQ ID NO: 74 - DNA, 30 bp, Artificial Sequence
  Description of Artificial Sequence: Synthetic oligonucleotide
gcttcatgtgtttttgtcaaaagacctttt

SEQ ID NO: 75 - DNA, 50 bp, Artificial Sequence
  Description of Artificial Sequence: Synthetic oligonucleotide
gccggttttttagtcgtgctgcttcatgtgtttttgtcaaaagacctttt

SEQ ID NO: 76 - DNA, 40 bp, Artificial Sequence
  Description of Artificial Sequence: Synthetic oligonucleotide
tagtcgtgctgcttcatgtgtttttgtcaaaagacctttt

SEQ ID NO: 77 - DNA, 20 bp, Artificial Sequence
  Description of Artificial Sequence: Synthetic oligonucleotide
ccgaagttttcttcggtttt

SEQ ID NO: 78 - DNA, 25 bp, Artificial Sequence
  Description of Artificial Sequence: Synthetic oligonucleotide
tttttccgaagttttcttcggtttt

SEQ ID NO: 79 - DNA, 30 bp, Artificial Sequence
  Description of Artificial Sequence: Synthetic oligonucleotide
aacgctttttccgaagttttcttcggtttt

SEQ ID NO: 80 - DNA, 41 bp, Artificial Sequence
  Description of Artificial Sequence: Synthetic oligonucleotide
gcgttgttttcaacgctttttccgaagttttcttcggtttt

SEQ ID NO: 81 - DNA, 62 bp, Artificial Sequence
  Description of Artificial Sequence: Synthetic oligonucleotide
ggcttcttttgaagcctttttgcgttgttttcaacgctttttccgaagttttcttcggtttt

SEQ ID NO: 82 - DNA, 25 bp, Artificial Sequence
  Description of Artificial Sequence: Synthetic oligonucleotide
atgtgtttttgtcaaaagacctttt

SEQ ID NO: 83 - RNA, 25 nt, Artificial Sequence
  Description of Artificial Sequence: Synthetic oligonucleotide
aaaaaaaaaaaaaaaaaaaaaaaaa

SEQ ID NO: 84 - DNA, 25 bp, Artificial Sequence
  Description of Artificial Sequence: Synthetic oligonucleotide
ttttttttttttttttttttttttt

SEQ ID NO: 85 - RNA, 25 nt, Artificial Sequence
  Description of Artificial Sequence: Synthetic oligonucleotide
auguguuuuugucaaaagaccuuuu

SEQ ID NO: 86 - RNA, 25 nt, Artificial Sequence
  Description of Artificial Sequence: Synthetic oligonucleotide
aaaaaaaaaaaaaaaaaaaaaaaaa

SEQ ID NO: 87 - RNA, 25 nt, Artificial Sequence
  Description of Artificial Sequence: Synthetic oligonucleotide
uuuuuuuuuuuuuuuuuuuuuuuuu

SEQ ID NO: 88 - DNA, 20 bp, Artificial Sequence
  Description of Artificial Sequence: Synthetic oligonucleotide
tctgcagaaatgttccccgt

SEQ ID NO: 89 - RNA, 20 nt, Artificial Sequence
  Description of Artificial Sequence: Synthetic oligonucleotide
ucugcagaaauguuccccgu

SEQ ID NO: 90 - RNA, 20 nt, Artificial Sequence
  Description of Artificial Sequence: Synthetic oligonucleotide
uaauuucuacucuuguagau

SEQ ID NO: 91 - RNA, 40 nt, Artificial Sequence
  Description of Artificial Sequence: Synthetic oligonucleotide
uaauuucuacucuuguagauucugcagaaauguuccccgu

SEQ ID NO: 92 - DNA, 65 bp, Artificial Sequence
  Description of Artificial Sequence: Synthetic oligonucleotide
  Description of Combined DNA/RNA Molecule: Synthetic oligonucleotide
atgtgtttttgtcaaaagaccttttuaauuucuacucuuguagauucugcagaaauguuccccgu

SEQ ID NO: 93 - RNA, 41 nt, Artificial Sequence
  Description of Artificial Sequence: Synthetic oligonucleotide
uaauuucuacucuuguagauaucuucuagguaugacaacga

SEQ ID NO: 94 - RNA, 21 nt, Artificial Sequence
  Description of Artificial Sequence: Synthetic oligonucleotide
ugagccagccaccagagggcg

SEQ ID NO: 95 - RNA, 21 nt, Artificial Sequence
  Description of Artificial Sequence: Synthetic oligonucleotide
aucuucuagguaugacaacga

SEQ ID NO: 96 - RNA, 21 nt, Artificial Sequence
  Description of Artificial Sequence: Synthetic oligonucleotide
gcuacagcaacaggguggugg

SEQ ID NO: 97 - RNA, 21 nt, Artificial Sequence
  Description of Artificial Sequence: Synthetic oligonucleotide
ccauaauuuccuuucaaggug

SEQ ID NO: 98 - RNA, 21 nt, Artificial Sequence
  Description of Artificial Sequence: Synthetic oligonucleotide
cuuucaagguggggagggagg

SEQ ID NO: 99 - RNA, 21 nt, Artificial Sequence
  Description of Artificial Sequence: Synthetic oligonucleotide
aagguggggagggagguagag

SEQ ID NO: 100 - RNA, 21 nt, Artificial Sequence
  Description of Artificial Sequence: Synthetic oligonucleotide
gcagaccacaguccaugccau

SEQ ID NO: 101 - RNA, 21 nt, Artificial Sequence
  Description of Artificial Sequence: Synthetic oligonucleotide
cagaccacaguccaugccauc

SEQ ID NO: 102 - RNA, 21 nt, Artificial Sequence
  Description of Artificial Sequence: Synthetic oligonucleotide
ccggaggggccauccacaguc

SEQ ID NO: 103 - RNA, 21 nt, Artificial Sequence
  Description of Artificial Sequence: Synthetic oligonucleotide
uagacggcaggucagguccac

SEQ ID NO: 104 - RNA, 21 nt, Artificial Sequence
  Description of Artificial Sequence: Synthetic oligonucleotide
cuagacggcaggucaggucca

SEQ ID NO: 105 - RNA, 21 nt, Artificial Sequence
  Description of Artificial Sequence: Synthetic oligonucleotide
ucuagacggcaggucaggucc

SEQ ID NO: 106 - RNA, 21 nt, Artificial Sequence
  Description of Artificial Sequence: Synthetic oligonucleotide
gcagguuuuucuagacggcag

SEQ ID NO: 107 - RNA, 21 nt, Artificial Sequence
  Description of Artificial Sequence: Synthetic oligonucleotide
ucaagcucauuuccugguaug

SEQ ID NO: 108 - RNA, 21 nt, Artificial Sequence
  Description of Artificial Sequence: Synthetic oligonucleotide
cugguauguggcuggggccag

SEQ ID NO: 109 - RNA, 21 nt, Artificial Sequence
  Description of Artificial Sequence: Synthetic oligonucleotide
agagccagucucuggccccag

SEQ ID NO: 110 - RNA, 21 nt, Artificial Sequence
  Description of Artificial Sequence: Synthetic oligonucleotide
aagagccagucucuggcccca

SEQ ID NO: 111 - RNA, 21 nt, Artificial Sequence
  Description of Artificial Sequence: Synthetic oligonucleotide
uaagagccagucucuggcccc

SEQ ID NO: 112 - RNA, 21 nt, Artificial Sequence
  Description of Artificial Sequence: Synthetic oligonucleotide
cugagccagccaccagagggc

SEQ ID NO: 113 - RNA, 21 nt, Artificial Sequence
  Description of Artificial Sequence: Synthetic oligonucleotide
ucugagccagccaccagaggg

SEQ ID NO: 114 - RNA, 21 nt, Artificial Sequence
  Description of Artificial Sequence: Synthetic oligonucleotide
caucuucuagguaugacaacg

SEQ ID NO: 115 - RNA, 21 nt, Artificial Sequence
  Description of Artificial Sequence: Synthetic oligonucleotide
uugaugguacaugacaaggug

SEQ ID NO: 116 - RNA, 21 nt, Artificial Sequence
  Description of Artificial Sequence: Synthetic oligonucleotide
gaggcccuacccucagucuga

SEQ ID NO: 117 - RNA, 21 nt, Artificial Sequence
  Description of Artificial Sequence: Synthetic oligonucleotide
ccucuccucgcuccaguccua

SEQ ID NO: 118 - RNA, 21 nt, Artificial Sequence
  Description of Artificial Sequence: Synthetic oligonucleotide
cucuccucgcuccaguccuag

SEQ ID NO: 119 - RNA, 21 nt, Artificial Sequence
  Description of Artificial Sequence: Synthetic oligonucleotide
gccaacagcagauagccuagg

SEQ ID NO: 120 - RNA, 21 nt, Artificial Sequence
  Description of Artificial Sequence: Synthetic oligonucleotide
ugugcccucgugucuuaucug

SEQ ID NO: 121 - RNA, 21 nt, Artificial Sequence
  Description of Artificial Sequence: Synthetic oligonucleotide
ccuagaugaauccugcuugaa

SEQ ID NO: 122 - RNA, 21 nt, Artificial Sequence
  Description of Artificial Sequence: Synthetic oligonucleotide
gguacuugguuuaccuagaug

SEQ ID NO: 123 - RNA, 21 nt, Artificial Sequence
  Description of Artificial Sequence: Synthetic oligonucleotide
agguacuugguuuaccuagau

SEQ ID NO: 124 - RNA, 21 nt, Artificial Sequence
  Description of Artificial Sequence: Synthetic oligonucleotide
aaacauuauauaguccuuacc

SEQ ID NO: 125 - RNA, 21 nt, Artificial Sequence
  Description of Artificial Sequence: Synthetic oligonucleotide
uaaacauuauauaguccuuac

SEQ ID NO: 126 - RNA, 21 nt, Artificial Sequence
  Description of Artificial Sequence: Synthetic oligonucleotide
ccgauuuuuaaacauuauaua

SEQ ID NO: 127 - RNA, 21 nt, Artificial Sequence
  Description of Artificial Sequence: Synthetic oligonucleotide
accgauuuuuaaacauuauau

SEQ ID NO: 128 - RNA, 21 nt, Artificial Sequence
  Description of Artificial Sequence: Synthetic oligonucleotide
uaccgauuuuuaaacauuaua

SEQ ID NO: 129 - RNA, 21 nt, Artificial Sequence
  Description of Artificial Sequence: Synthetic oligonucleotide
aaaaucgguaaaaaugcccac

SEQ ID NO: 130 - RNA, 21 nt, Artificial Sequence
  Description of Artificial Sequence: Synthetic oligonucleotide
gaggaagaugaacugagaugu

SEQ ID NO: 131 - RNA, 21 nt, Artificial Sequence
  Description of Artificial Sequence: Synthetic oligonucleotide
aggaagaugaacugagaugug

SEQ ID NO: 132 - DNA, 20 bp, Artificial Sequence
  Description of Artificial Sequence: Synthetic oligonucleotide
gctggtgttatattctgatg

SEQ ID NO: 133 - DNA, 20 bp, Artificial Sequence
  Description of Artificial Sequence: Synthetic oligonucleotide
ccgacttctgaacgtgcggt

SEQ ID NO: 134 - DNA, 20 bp, Artificial Sequence
  Description of Artificial Sequence: Synthetic oligonucleotide
tgctggcgatacgcgtccac

SEQ ID NO: 135 - DNA, 20 bp, Artificial Sequence
  Description of Artificial Sequence: Synthetic oligonucleotide
cccgacttctgaacgtgcgg

SEQ ID NO: 136 - DNA, 20 bp, Artificial Sequence
  Description of Artificial Sequence: Synthetic oligonucleotide
ccaccgcacgttcagaagtc

SEQ ID NO: 137 - DNA, 20 bp, Artificial Sequence
  Description of Artificial Sequence: Synthetic oligonucleotide
tcacccgacttctgaacgtg

SEQ ID NO: 138 - DNA, 20 bp, Artificial Sequence
  Description of Artificial Sequence: Synthetic oligonucleotide
cccaccgcacgttcagaagt

SEQ ID NO: 139 - DNA, 20 bp, Artificial Sequence
  Description of Artificial Sequence: Synthetic oligonucleotide
cgagcagcggggtctgccat

SEQ ID NO: 140 - DNA, 20 bp, Artificial Sequence
  Description of Artificial Sequence: Synthetic oligonucleotide
acgagcagcggggtctgcca

SEQ ID NO: 141 - DNA, 20 bp, Artificial Sequence
  Description of Artificial Sequence: Synthetic oligonucleotide
agcggggtctgccatgggtc

SEQ ID NO: 142 - DNA, 20 bp, Artificial Sequence
  Description of Artificial Sequence: Synthetic oligonucleotide
cctgagcagcccccgaccca

SEQ ID NO: 143 - DNA, 20 bp, Artificial Sequence
  Description of Artificial Sequence: Synthetic oligonucleotide
ccatgggtcgggggctgctc

SEQ ID NO: 144 - DNA, 20 bp, Artificial Sequence
  Description of Artificial Sequence: Synthetic oligonucleotide
aacgtgcggtgggatcgtgc

SEQ ID NO: 145 - DNA, 20 bp, Artificial Sequence
  Description of Artificial Sequence: Synthetic oligonucleotide
ggacgatgtgcagcggccac

SEQ ID NO: 146 - DNA, 20 bp, Artificial Sequence
  Description of Artificial Sequence: Synthetic oligonucleotide
gtccacaggacgatgtgcag

SEQ ID NO: 147 - DNA, 20 bp, Artificial Sequence
  Description of Artificial Sequence: Synthetic oligonucleotide
catgggtcgggggctgctca

SEQ ID NO: 148 - RNA, 21 nt, Artificial Sequence
  Description of Artificial Sequence: Synthetic oligonucleotide
aaaugcuucauaaauuucugc

SEQ ID NO: 149 - RNA, 21 nt, Artificial Sequence
  Description of Artificial Sequence: Synthetic oligonucleotide
ugcucugacuuuagcaccuaa

SEQ ID NO: 150 - RNA, 21 nt, Artificial Sequence
  Description of Artificial Sequence: Synthetic oligonucleotide
aaaacaucuacccuauucuaa

SEQ ID NO: 151 - RNA, 21 nt, Artificial Sequence
  Description of Artificial Sequence: Synthetic oligonucleotide
ccccucugcuucgucuuucuc

SEQ ID NO: 152 - RNA, 21 nt, Artificial Sequence
  Description of Artificial Sequence: Synthetic oligonucleotide
uccacccccgggagaccacga

SEQ ID NO: 153 - RNA, 21 nt, Artificial Sequence
  Description of Artificial Sequence: Synthetic oligonucleotide
augugccuguucucaaccucu

SEQ ID NO: 154 - RNA, 21 nt, Artificial Sequence
  Description of Artificial Sequence: Synthetic oligonucleotide
caguaugagggcaccuacaag

SEQ ID NO: 155 - RNA, 21 nt, Artificial Sequence
  Description of Artificial Sequence: Synthetic oligonucleotide
ccgccuuaaauccacagcaua

SEQ ID NO: 156 - RNA, 21 nt, Artificial Sequence
  Description of Artificial Sequence: Synthetic oligonucleotide
uaaccaagugcucuguaguuu

SEQ ID NO: 157 - RNA, 21 nt, Artificial Sequence
  Description of Artificial Sequence: Synthetic oligonucleotide
gaccucuccaguguguuaaug

SEQ ID NO: 158 - DNA, 141 bp, Artificial Sequence
  Description of Artificial Sequence: Synthetic polynucleotide
cctgcaggcagctgcgcgctcgctcgctcactgaggccgcccgggcaaagcccgggcgtcgggcgacctttggtcgcccggcctcagtgagcgagcgagcgcgcagagagggagtggccaactccatcactaggggttcct

SEQ ID NO: 159 - DNA, 141 bp, Artificial Sequence
  Description of Artificial Sequence: Synthetic polynucleotide
aggaacccctagtgatggagttggccactccctctctgcgcgctcgctcgctcactgaggccgggcgaccaaaggtcgcccgacgcccgggctttgcccgggcggcctcagtgagcgagcgagcgcgcagctgcctgcagg

SEQ ID NO: 160 - DNA, 20 bp, Artificial Sequence
  Description of Artificial Sequence: Synthetic oligonucleotide
gacaacatcatcttctcaga

SEQ ID NO: 161 - protein, 159 aa, Artificial Sequence
  Description of Artificial Sequence: Synthetic polypeptide
MISLIAALAVDYVIGMENAMPWNLPADLAWFKRNTLNKPVIMGRHTWESIGRPLPGRKNIILSSQPSTDDRVTWVKSVDEAIAACGDVPEIMVIGGGRVIEQFLPKAQKLYLTHIDAEVEGDTHFPDYEPDDWESVFSEFHDADAQNSHSYCFEILERR

SEQ ID NO: 162 - DNA, 483 bp, Artificial Sequence
  Description of Artificial Sequence: Synthetic polynucleotide
ggtaccatcagtctgattgcggcgttagcggtagattacgttatcggcatggaaaacgccatgccgtggaacctgcctgccgatctcgcctggtttaaacgcaacaccttaaataaacccgtgattatgggccgccatacctgggaatcaatcggtcgtccgttgccaggacgcaaaaatattatcctcagcagtcaaccgagtacggacgatcgcgtaacgtgggtgaagtcggtggatgaagccatcgcggcgtgtggtgacgtaccagaaatcatggtgattggcggcggtcgcgttattgaacagttcttgccaaaagcgcaaaaactgtatctgacgcatatcgacgcagaagtggaaggcgacacccatttcccggattacgagccggatgactgggaatcggtattcagcgaattccacgatgctgatgcgcagaactctcacagctattgctttgagattctggagcggcgataa

SEQ ID NO: 163 - DNA, 474 bp, Artificial Sequence
  Description of Artificial Sequence: Synthetic polynucleotide
atcagtctgattgcggcgttagcggtagattacgttatcggcatggaaaacgccatgccgtggaacctgcctgccgatctcgcctggtttaaacgcaacaccttaaataaacccgtgattatgggccgccatacctgggaatcaatcggtcgtccgttgccaggacgcaaaaatattatcctcagcagtcaaccgagtacggacgatcgcgtaacgtgggtgaagtcggtggatgaagccatcgcggcgtgtggtgacgtaccagaaatcatggtgattggcggcggtcgcgttattgaacagttcttgccaaaagcgcaaaaactgtatctgacgcatatcgacgcagaagtggaaggcgacacccatttcccggattacgagccggatgactgggaatcggtattcagcgaattccacgatgctgatgcgcagaactctcacagctattgctttgagattctggagcggcga

SEQ ID NO: 164 - protein, 112 aa, Artificial Sequence
  Description of Artificial Sequence: Synthetic polypeptide
MGVEKQVIRPGNGPKPAPGQTVTVHCTGFGKDGDLSQKFWSTKDEGQKPFSFQIGKGAVIKGWDEGVIGMQIGEVARLRCSSDYAYGAGGFPAWGIQPNSVLDFEIEVLSVQ

SEQ ID NO: 165 - DNA, 765 bp, Artificial Sequence
  Description of Artificial Sequence: Synthetic polynucleotide
atgtggcaactgctgctgcctacagctctgctgcttctggtgtctgccggcatgagaaccgaggatctgcctaaggccgtggtgttcctggaacctcagtggtacagagtgctggaaaaggacagcgtgaccctgaagtgccagggcgcctattctcccgaggacaatagcacccagtggttccacaacgagagcctgatcagcagccaggccagcagctactttatcgatgccgccaccgtggacgacagcggcgagtacagatgccagaccaatctgagcaccctgagcgaccctgtgcagctggaagtgcacattggatggttgctgctgcaagcccctagatgggtgttcaaagaagaggaccccatccacctgagatgccactcttggaagaacacagccctgcacaaagtgacctacctgcagaacggcaagggcagaaagtacttccaccacaacagcgacttctacatccccaaggccacactgaaggactccggctcctacttctgcagaggcctggtcggcagcaagaacgtgtccagcgagacagtgaacatcaccatcacacagggcctcgccgtgtctaccatcagcagctttttcccacctggctatcaggtgtccttctgcctggtcatggtgctgctgttcgccgtggataccggcctgtacttcagcgtcaagaccaacatccggtccagcaccagagactggaaggaccacaagttcaagtggcggaaggaccctcaggacaagtaa

SEQ ID NO: 166 - DNA, 762 bp, Artificial Sequence
  Description of Artificial Sequence: Synthetic polynucleotide
atgtggcagctgttgctgccgacagccctcctgttgctggtctccgctggcatgagaaccgaggatctgcctaaggccgtggtgttcctggaacctcagtggtacagagtgctggaaaaggacagcgtgaccctgaagtgccagggcgcctattctcccgaggacaatagcacccagtggttccacaacgagagcctgatcagcagccaggccagcagctactttatcgatgccgccaccgtggacgacagcggcgagtacagatgccagaccaatctgagcaccctgagcgaccctgtgcagctggaagtgcacattggatggttgctgctgcaagcccctagatgggtgttcaaagaagaggaccccatccacctgagatgccactcttggaagaacacagccctgcacaaagtgacctacctgcagaacggcaagggcagaaagtacttccaccacaacagcgacttctacatccccaaggccacactgaaggactccggctcctacttctgcagaggcctggtcggcagcaagaacgtgtccagcgagacagtgaacatcaccatcacacagggcctcgccgtgtctaccatcagcagctttttcccacctggctatcaggtgtccttctgcctggtcatggtgctgctgttcgccgtggataccggcctgtacttcagcgtcaagaccaacatccggtccagcaccagagactggaaggaccacaagttcaagtggcggaaggaccctcaggacaag

SEQ ID NO: 167 - DNA, 972 bp, Artificial Sequence
  Description of Artificial Sequence: Synthetic polynucleotide
atgtggcccctggtagcggcgctgttgctgggctcggcgtgctgcggatcagctcagctactatttaataaaacaaaatctgtagaattcacgttttgtaatgacactgtcgtcattccatgctttgttactaatatggaggcacaaaacactactgaagtatacgtaaagtggaaatttaaaggaagagatatttacacctttgatggagctctaaacaagtccactgtccccactgactttagtagtgcaaaaattgaagtctcacaattactaaaaggagatgcctctttgaagatggataagagtgatgctgtctcacacacaggaaactacacttgtgaagtaacagaattaaccagagaaggtgaaacgatcatcgagctaaaatatcgtgttgtttcatggttttctccaaatgaaaatattcttattgttattttcccaatttttgctatactcctgttctggggacagtttggtattaaaacacttaaatatagatccggtggtatggatgagaaaacaattgctttacttgttgctggactagtgatcactgtcattgtcattgttggagccattcttttcgtcccaggtgaatattcattaaagaatgctactggccttggtttaattgtgacttctacagggatattaatattacttcactactatgtgtttagtacagcgattggattaacctccttcgtcattgccatattggttattcaggtgatagcctatatcctcgctgtggttggactgagtctctgtattgcggcgtgtataccaatgcatggccctcttctgatttcaggtttgagtatcttagctctagcacaattacttggactagtttatatgaaatttgtggcttccaatcagaagactatacaacctcctaggaaagctgtagaggaaccccttaatgcattcaaagaatcaaaaggaatgatgaatgatgaatga

SEQ ID NO: 168 - DNA, 342 bp, Artificial Sequence
  Description of Artificial Sequence: Synthetic polynucleotide
aattgggtcaacgtgatcagcgacctgaagaagatcgaggacctgatccagagcatgcacatcgacgccacactgtacaccgagtccgatgtgcaccctagctgcaaagtgaccgccatgaagtgctttctgctggaactgcaagtgatcagcctggaaagcggcgacgccagcatccacgataccgtggaaaacctgatcatcctggccaacaacagcctgagcagcaacggcaatgtgaccgagagcggctgcaaagagtgcgaggaactggaagagaagaacatcaaagagttcctccagagcttcgtccacatcgtgcagatgttcatcaacaccagc

SEQ ID NO: 169 - DNA, 396 bp, Artificial Sequence
  Description of Artificial Sequence: Synthetic polynucleotide
atggattggacctggatcctgtttctggtggccgctgccacaagagtgcacagcaattgggtcaacgtgatcagcgacctgaagaagatcgaggacctgatccagagcatgcacatcgacgccacactgtacaccgagtccgatgtgcaccctagctgcaaagtgaccgccatgaagtgctttctgctggaactgcaagtgatcagcctggaaagcggcgacgccagcatccacgataccgtggaaaacctgatcatcctggccaacaacagcctgagcagcaacggcaatgtgaccgagagcggctgcaaagagtgcgaggaactggaagagaagaacatcaaagagttcctccagagcttcgtccacatcgtgcagatgttcatcaacaccagc

SEQ ID NO: 170 - DNA, 453 bp, Artificial Sequence
  Description of Artificial Sequence: Synthetic polynucleotide
atggactggacctggattctgttcctggtcgcggctgcaacgcgagtccatagcggtatccatgtttttattcttgggtgtttttctgctgggctgcctaagaccgaggccaactgggtaaatgtcatcagtgacctcaagaaaatagaagaccttatacaaagcatgcacattgatgctactctctacactgagtcagatgtacatccctcatgcaaagtgacggccatgaaatgtttcctcctcgaacttcaagtcatatctctggaaagtggcgacgcgtccatccacgacacggtcgaaaacctgataatactcgctaataatagtctctcttcaaatggtaacgtaaccgagtcaggttgcaaagagtgcgaagagttggaagaaaaaaacataaaggagttcctgcaaagtttcgtgcacattgtgcagatgttcattaatacctct

SEQ ID NO: 171 - DNA, 711 bp, Artificial Sequence
  Description of Artificial Sequence: Synthetic polynucleotide
atcacctgtcctccacctatgagcgtggaacacgccgacatctgggtcaagagctacagcctgtacagcagagagcggtacatctgcaacagcggcttcaagagaaaggccggcacaagcagcctgaccgagtgtgtgctgaacaaggccacaaacgtggcccactggaccacacctagcctgaagtgcatcagagatcccgctctggttcatcagaggcctgcccctccatctacagtgacaacagctggcgtgacccctcagcctgagtctctgtctccatctggaaaagagcctgccgccagctctcccagctctaacaatactgctgccaccacagccgctatcgtgcctggatctcagctgatgcctagcaagagccctagcaccggcacaacagagatcagctctcacgagagcagccacggaacaccttctcagaccaccgccaagaattgggagctgacagcctctgcctctcatcagccacctggcgtgtacccacagggccactctgatacaacagtggccatcagcaccagcaccgttctgctgtgtggcctgtctgctgttagcctgctggcctgctacctgaagtctagacagacacctcctctggccagcgtggaaatggaagccatggaagctctgcctgtcacatggggcaccagcagcagagatgaggacctcgagaattgcagccaccacctg

SEQ ID NO: 172 - DNA, 1185 bp, Artificial Sequence
  Description of Artificial Sequence: Synthetic polynucleotide
atggattggacctggatcctgtttctggtggccgctgccacaagagtgcacagcaattgggtcaacgtgatcagcgacctgaagaagatcgaggacctgatccagagcatgcacatcgacgccacactgtacaccgagtccgatgtgcaccctagctgcaaagtgaccgccatgaagtgctttctgctggaactgcaagtgatcagcctggaaagcggcgacgccagcatccacgataccgtggaaaacctgatcatcctggccaacaacagcctgagcagcaacggcaatgtgaccgagagcggctgcaaagagtgcgaggaactggaagagaagaacatcaaagagttcctccagagcttcgtccacatcgtgcagatgttcatcaacaccagctctggcggaggaagcggaggcggaggatctggtggtggtggatctggcggcggtggtagtggcggaggttctctgcaaatcacctgtcctccacctatgagcgtggaacacgccgacatctgggtcaagagctacagcctgtacagcagagagcggtacatctgcaacagcggcttcaagagaaaggccggcacaagcagcctgaccgagtgtgtgctgaacaaggccacaaacgtggcccactggaccacacctagcctgaagtgcatcagagatcccgctctggttcatcagaggcctgcccctccatctacagtgacaacagctggcgtgacccctcagcctgagtctctgtctccatctggaaaagagcctgccgccagctctcccagctctaacaatactgctgccaccacagccgctatcgtgcctggatctcagctgatgcctagcaagagccctagcaccggcacaacagagatcagctctcacgagagcagccacggaacaccttctcagaccaccgccaagaattgggagctgacagcctctgcctctcatcagccacctggcgtgtacccacagggccactctgatacaacagtggccatcagcaccagcaccgttctgctgtgtggcctgtctgctgttagcctgctggcctgctacctgaagtctagacagacacctcctctggccagcgtggaaatggaagccatggaagctctgcctgtcacatggggcaccagcagcagagatgaggacctcgagaattgcagccaccacctg

SEQ ID NO: 173 - DNA, 1242 bp, Artificial Sequence
  Description of Artificial Sequence: Synthetic polynucleotide
atggactggacctggattctgttcctggtcgcggctgcaacgcgagtccatagcggtatccatgtttttattcttgggtgtttttctgctgggctgcctaagaccgaggccaactgggtaaatgtcatcagtgacctcaagaaaatagaagaccttatacaaagcatgcacattgatgctactctctacactgagtcagatgtacatccctcatgcaaagtgacggccatgaaatgtttcctcctcgaacttcaagtcatatctctggaaagtggcgacgcgtccatccacgacacggtcgaaaacctgataatactcgctaataatagtctctcttcaaatggtaacgtaaccgagtcaggttgcaaagagtgcgaagagttggaagaaaaaaacataaaggagttcctgcaaagtttcgtgcacattgtgcagatgttcattaatacctctagcggcggaggatcaggtggcggtggaagcggaggtggaggctccggtggaggaggtagtggcggaggttctcttcaaataacttgtcctccaccgatgtccgtagaacatgcggatatttgggtaaaatcctatagcttgtacagccgagagcggtatatctgcaacagcggcttcaagcggaaggccggcacaagcagcctgaccgagtgcgtgctgaacaaggccaccaacgtggcccactggaccacccctagcctgaagtgcatcagagatcccgccctggtgcatcagcggcctgcccctccaagcacagtgacaacagctggcgtgaccccccagcctgagagcctgagcccttctggaaaagagcctgccgccagcagccccagcagcaacaatactgccgccaccacagccgccatcgtgcctggatctcagctgatgcccagcaagagccctagcaccggcaccaccgagatcagcagccacgagtctagccacggcaccccatctcagaccaccgccaagaactgggagctgacagccagcgcctctcaccagcctccaggcgtgtaccctcagggccacagcgataccacagtggccatcagcacctccaccgtgctgctgtgtggactgagcgccgtgtcactgctggcctgctacctgaagtccagacagacccctccactggccagcgtggaaatggaagccatggaagcactgcccgtgacctggggcaccagctccagagatgaggatctggaaaactgctcccaccacctg

SEQ ID NO: 174 - DNA, 2013 bp, Artificial Sequence
  Description of Artificial Sequence: Synthetic polynucleotide
atgtggcagctgttgctgccgacagccctcctgttgctggtctccgctggcatgagaaccgaggatctgcctaaggccgtggtgttcctggaacctcagtggtacagagtgctggaaaaggacagcgtgaccctgaagtgccagggcgcctattctcccgaggacaatagcacccagtggttccacaacgagagcctgatcagcagccaggccagcagctactttatcgatgccgccaccgtggacgacagcggcgagtacagatgccagaccaatctgagcaccctgagcgaccctgtgcagctggaagtgcacattggatggttgctgctgcaagcccctagatgggtgttcaaagaagaggaccccatccacctgagatgccactcttggaagaacacagccctgcacaaagtgacctacctgcagaacggcaagggcagaaagtacttccaccacaacagcgacttctacatccccaaggccacactgaaggactccggctcctacttctgcagaggcctggtcggcagcaagaacgtgtccagcgagacagtgaacatcaccatcacacagggcctcgccgtgtctaccatcagcagctttttcccacctggctatcaggtgtccttctgcctggtcatggtgctgctgttcgccgtggataccggcctgtacttcagcgtcaagaccaacatccggtccagcaccagagactggaaggaccacaagttcaagtggcggaaggaccctcaggacaagggaagcggagccacaaacttctctctgctgaagcaggcaggagatgttgaagaaaaccctggacctatggattggacctggatcctgtttctggtggccgctgccacaagagtgcacagcaattgggtcaacgtgatcagcgacctgaagaagatcgaggacctgatccagagcatgcacatcgacgccacactgtacaccgagtccgatgtgcaccctagctgcaaagtgaccgccatgaagtgctttctgctggaactgcaagtgatcagcctggaaagcggcgacgccagcatccacgataccgtggaaaacctgatcatcctggccaacaacagcctgagcagcaacggcaatgtgaccgagagcggctgcaaagagtgcgaggaactggaagagaagaacatcaaagagttcctccagagcttcgtccacatcgtgcagatgttcatcaacaccagctctggcggaggaagcggaggcggaggatctggtggtggtggatctggcggcggtggtagtggcggaggttctctgcaaatcacctgtcctccacctatgagcgtggaacacgccgacatctgggtcaagagctacagcctgtacagcagagagcggtacatctgcaacagcggcttcaagagaaaggccggcacaagcagcctgaccgagtgtgtgctgaacaaggccacaaacgtggcccactggaccacacctagcctgaagtgcatcagagatcccgctctggttcatcagaggcctgcccctccatctacagtgacaacagctggcgtgacccctcagcctgagtctctgtctccatctggaaaagagcctgccgccagctctcccagctctaacaatactgctgccaccacagccgctatcgtgcctggatctcagctgatgcctagcaagagccctagcaccggcacaacagagatcagctctcacgagagcagccacggaacaccttctcagaccaccgccaagaattgggagctgacagcctctgcctctcatcagccacctggcgtgtacccacagggccactctgatacaacagtggccatcagcaccagcaccgttctgctgtgtggcctgtctgctgttagcctgctggcctgctacctgaagtctagacagacacctcctctggccagcgtggaaatggaagccatggaagctctgcctgtcacatggggcaccagcagcagagatgaggacctcgagaattgcagccaccacctg

SEQ ID NO: 175 - DNA, 1470 bp, Artificial Sequence
  Description of Artificial Sequence: Synthetic polynucleotide
atgcttctcctggtgacaagccttctgctctgtgagttaccacacccagcattcctcctgatcccagacatccagatgacacagactacatcctccctgtctgcctctctgggagacagagtcaccatcagttgcagggcaagtcaggacattagtaaatatttaaattggtatcagcagaaaccagatggaactgttaaactcctgatctaccatacatcaagattacactcaggagtcccatcaaggttcagtggcagtgggtctggaacagattattctctcaccattagcaacctggagcaagaagatattgccacttacttttgccaacagggtaatacgcttccgtacacgttcggaggggggactaagttggaaataacaggctccacctctggatccggcaagcccggatctggcgagggatccaccaagggcgaggtgaaactgcaggagtcaggacctggcctggtggcgccctcacagagcctgtccgtcacatgcactgtctcaggggtctcattacccgactatggtgtaagctggattcgccagcctccacgaaagggtctggagtggctgggagtaatatggggtagtgaaaccacatactataattcagctctcaaatccagactgaccatcatcaaggacaactccaagagccaagttttcttaaaaatgaacagtctgcaaactgatgacacagccatttactactgtgccaaacattattactacggtggtagctatgctatggactactggggtcaaggaacctcagtcaccgtctcctcagcggccgcaattgaagttatgtatcctcctccttacctagacaatgagaagagcaatggaaccattatccatgtgaaagggaaacacctttgtccaagtcccctatttcccggaccttctaagcccttttgggtgctggtggtggttgggggagtcctggcttgctatagcttgctagtaacagtggcctttattattttctgggtgaggagtaagaggagcaggctcctgcacagtgactacatgaacatgactccccgccgccccgggcccacccgcaagcattaccagccctatgccccaccacgcgacttcgcagcctatcgctccagagtgaagttcagcaggagcgcagacgcccccgcgtaccagcagggccagaaccagctctataacgagctcaatctaggacgaagagaggagtacgatgttttggacaagagacgtggccgggaccctgagatggggggaaagccgagaaggaagaaccctcaggaaggcctgtacaatgaactgcagaaagataagatggcggaggcctacagtgagattgggatgaaaggcgagcgccggaggggcaaggggcacgatggcctttaccagggtctcagtacagccaccaaggacacctacgacgcccttcacatgcaggccctgccccctcgctaa

SEQ ID NO: 176 - DNA, 1485 bp, Artificial Sequence
  Description of Artificial Sequence: Synthetic polynucleotide
atggcactccccgtcaccgcccttctcttgcccctcgccctgctgctgcatgctgccaggcccatggacgaagtgcagctcgtggagtccggtggaggactcgtccaaccgggcggatcccttcgcttgtcctgcgccgcatcaggcttcagcttcaccaactatggcgtccactgggtcagacaggcccccggaaagggactggaatgggtgtccgtgatctggagcggcgggaacaccgactacaacacctccgtgaagggccggttcactattagccgcgacaactccaagaacactctgtacctccaaatgaactccctgagggccgaagatactgctgtgtactattgcgcgagagccctgacctactacgactacgagttcgcgtactggggccaggggactctcgtgaccgtgtccagcggtggtggaggttccggaggcggaggttctggtggcgggggatcagaaatcgtgctgactcagtcccctgcgaccttgtccctgagccctggagaacgggccaccctgagctgtagagccagccagagcatcgggacaaatattcactggtaccagcagaaacccggacaagcaccacggctgctgatctactacgcctccgagtcgatttccggaatcccggctcgcttttcggggtctggatcgggaacggacttcactctgaccatctcgtcgctggaacccgaggatttcgccgtgtactactgccaacagaacaacaattggccgaccacgttcggccagggcaccaagctcgagattaagggatcactggaagcggccgcaaccacaacacctgctccaaggccccccacacccgctccaactatagccagccaaccattgagcctcagacctgaagcttgcaggcccgcagcaggaggcgccgtccatacgcgaggcctggacttcgcgtgtgatatttatatttgggcccctttggccggaacatgtggggtgttgcttctctcccttgtgatcactctgtattgtaagcgcgggagaaagaagctcctgtacatcttcaagcagccttttatgcgacctgtgcaaaccactcaggaagaagatgggtgttcatgccgcttccccgaggaggaagaaggagggtgtgaactgagggtgaaattttctagaagcgccgatgctcccgcatatcagcagggtcagaatcagctctacaatgaattgaatctcggcaggcgagaagagtacgatgttctggacaagagacggggcagggatcccgagatggggggaaagccccggagaaaaaatcctcaggaggggttgtacaatgagctgcagaaggacaagatggctgaagcctatagcgagatcggaatgaaaggcgaaagacgcagaggcaaggggcatgacggtctgtaccagggtctctctacagccaccaaggacacttatgatgcgttgcatatgcaagccttgccaccccgctaa

SEQ ID NO: 177 - DNA, 720 bp, Artificial Sequence
  Description of Artificial Sequence: Synthetic polynucleotide
atggtgagcaagggcgaggagctgttcaccggggtggtgcccatcctggtcgagctggacggcgacgtaaacggccacaagttcagcgtgtccggcgagggcgagggcgatgccacctacggcaagctgaccctgaagttcatctgcaccaccggcaagctgcccgtgccctggcccaccctcgtgaccaccctgacctacggcgtgcagtgcttcagccgctaccccgaccacatgaagcagcacgacttcttcaagtccgccatgcccgaaggctacgtccaggagcgcaccatcttcttcaaggacgacggcaactacaagacccgcgccgaggtgaagttcgagggcgacaccctggtgaaccgcatcgagctgaagggcatcgacttcaaggaggacggcaacatcctggggcacaagctggagtacaactacaacagccacaacgtctatatcatggccgacaagcagaagaacggcatcaaggtgaacttcaagatccgccacaacatcgaggacggcagcgtgcagctcgccgaccactaccagcagaacacccccatcggcgacggccccgtgctgctgcccgacaaccactacctgagcacccagtccgccctgagcaaagaccccaacgagaagcgcgatcacatggtcctgctggagttcgtgaccgccgccgggatcactctcggcatggacgagctgtacaagtga

SEQ ID NO: 178 - DNA, 1053 bp, Artificial Sequence
  Description of Artificial Sequence: Synthetic polynucleotide
atgtcaaatattacagatccacagatgtgggattttgatgatctaaatttcactggcatgccacctgcagatgaagattacagcccctgtatgctagaaactgagacactcaacaagtatgttgtgatcatcgcctatgccctagtgttcctgctgagcctgctgggaaactccctggtgatgctggtcatcttatacagcagggtcggccgctccgtcactgatgtctacctgctgaacctggccttggccgacctactctttgccctgaccttgcccatctgggccgcctccaaggtgaatggctggatttttggcacattcctgtgcaaggtggtctcactcctgaaggaagtcaacttctacagtggcatcctgctgttggcctgcatcagtgtggaccgttacctggccattgtccatgccacacgcacactgacccagaagcgtcacttggtcaagtttgtttgtcttggctgctggggactgtctatgaatctgtccctgcccttcttccttttccgccaggcttaccatccaaacaattccagtccagtttgctatgaggtcctgggaaatgacacagcaaaatggcggatggtgttgcggatcctgcctcacacctttggcttcatcgtgccgctgtttgtcatgctgttctgctatggattcaccctgcgtacactgtttaaggcccacatggggcagaagcaccgagccatgagggtcatctttgctgtcgtcctcatcttcctgctttgctggctgccctacaacctggtcctgctggcagacaccctcatgaggacccaggtgatccaggagagctgtgagcgccgcaacaacatcggccgggccctggatgccactgagattctgggatttctccatagctgcctcaaccccatcatctacgccttcatcggccaaaattttcgccatggattcctcaagatcctggctatgcatggcctggtcagcaaggagttcttggcacgtcatcgtgttacctcctacacttcttcgtctgtcaatgtctcttccaacctctga

SEQ ID NO: 179 - DNA, 1248 bp, Artificial Sequence
  Description of Artificial Sequence: Synthetic polynucleotide
atggagttgaggaagtacggccctggaagactggcggggacagttataggaggagctgctcagagtaaatcacagactaaatcagactcaatcacaaaagagttcctgccaggcctttacacagccccttcctccccgttcccgccctcacaggtgagtgaccaccaagtgctaaatgacgccgaggttgccgccctcctggagaacttcagctcttcctatgactatggagaaaacgagagtgactcgtgctgtacctccccgccctgcccacaggacttcagcctgaacttcgaccgggccttcctgccagccctctacagcctcctctttctgctggggctgctgggcaacggcgcggtggcagccgtgctgctgagccggcggacagccctgagcagcaccgacaccttcctgctccacctagctgtagcagacacgctgctggtgctgacactgccgctctgggcagtggacgctgccgtccagtgggtctttggctctggcctctgcaaagtggcaggtgccctcttcaacatcaacttctacgcaggagccctcctgctggcctgcatcagctttgaccgctacctgaacatagttcatgccacccagctctaccgccgggggcccccggcccgcgtgaccctcacctgcctggctgtctgggggctctgcctgcttttcgccctcccagacttcatcttcctgtcggcccaccacgacgagcgcctcaacgccacccactgccaatacaacttcccacaggtgggccgcacggctctgcgggtgctgcagctggtggctggctttctgctgcccctgctggtcatggcctactgctatgcccacatcctggccgtgctgctggtttccaggggccagcggcgcctgcgggccatgcggctggtggtggtggtcgtggtggcctttgccctctgctggaccccctatcacctggtggtgctggtggacatcctcatggacctgggcgctttggcccgcaactgtggccgagaaagcagggtagacgtggccaagtcggtcacctcaggcctgggctacatgcactgctgcctcaacccgctgctctatgcctttgtaggggtcaagttccgggagcggatgtggatgctgctcttgcgcctgggctgccccaaccagagagggctccagaggcagccatcgtcttcccgccgggattcatcctggtctgagacctcagaggcctcctactcgggcttgtga

SEQ ID NO: 180 - DNA, 1107 bp, Artificial Sequence
  Description of Artificial Sequence: Synthetic polynucleotide
atggtccttgaggtgagtgaccaccaagtgctaaatgacgccgaggttgccgccctcctggagaacttcagctcttcctatgactatggagaaaacgagagtgactcgtgctgtacctccccgccctgcccacaggacttcagcctgaacttcgaccgggccttcctgccagccctctacagcctcctctttctgctggggctgctgggcaacggcgcggtggcagccgtgctgctgagccggcggacagccctgagcagcaccgacaccttcctgctccacctagctgtagcagacacgctgctggtgctgacactgccgctctgggcagtggacgctgccgtccagtgggtctttggctctggcctctgcaaagtggcaggtgccctcttcaacatcaacttctacgcaggagccctcctgctggcctgcatcagctttgaccgctacctgaacatagttcatgccacccagctctaccgccgggggcccccggcccgcgtgaccctcacctgcctggctgtctgggggctctgcctgcttttcgccctcccagacttcatcttcctgtcggcccaccacgacgagcgcctcaacgccacccactgccaatacaacttcccacaggtgggccgcacggctctgcgggtgctgcagctggtggctggctttctgctgcccctgctggtcatggcctactgctatgcccacatcctggccgtgctgctggtttccaggggccagcggcgcctgcgggccatgcggctggtggtggtggtcgtggtggcctttgccctctgctggaccccctatcacctggtggtgctggtggacatcctcatggacctgggcgctttggcccgcaactgtggccgagaaagcagggtagacgtggccaagtcggtcacctcaggcctgggctacatgcactgctgcctcaacccgctgctctatgcctttgtaggggtcaagttccgggagcggatgtggatgctgctcttgcgcctgggctgccccaaccagagagggctccagaggcagccatcgtcttcccgccgggattcatcctggtctgagacctcagaggcctcctactcgggcttgtga

SEQ ID NO: 181 - DNA, 1059 bp, Artificial Sequence
  Description of Artificial Sequence: Synthetic polynucleotide
atggattatcaagtgtcaagtccaatctatgacatcaattattatacatcggagccctgccaaaaaatcaatgtgaagcaaatcgcagcccgcctcctgcctccgctctactcactggtgttcatctttggttttgtgggcaacatgctggtcatcctcatcctgataaactgcaaaaggctgaagagcatgactgacatctacctgctcaacctggccatctctgacctgtttttccttcttactgtccccttctgggctcactatgctgccgcccagtgggactttggaaatacaatgtgtcaactcttgacagggctctattttataggcttcttctctggaatcttcttcatcatcctcctgacaatcgataggtacctggctgtcgtccatgctgtgtttgctttaaaagccaggacggtcacctttggggtggtgacaagtgtgatcacttgggtggtggctgtgtttgcgtctctcccaggaatcatctttaccagatctcaaaaagaaggtcttcattacacctgcagctctcattttccatacagtcagtatcaattctggaagaatttccagacattaaagatagtcatcttggggctggtcctgccgctgcttgtcatggtcatctgctactcgggaatcctaaaaactctgcttcggtgtcgaaatgagaagaagaggcacagggctgtgaggcttatcttcaccatcatgattgtttattttctcttctgggctccctacaacattgtccttctcctgaacaccttccaggaattctttggcctgaataattgcagtagctctaacaggttggaccaagctatgcaggtgacagagactcttgggatgacgcactgctgcatcaaccccatcatctatgcctttgtcggggagaagttcagaaactacctcttagtcttcttccaaaagcacattgccaaacgcttctgcaaatgctgttctattttccagcaagaggctcccgagcgagcaagctcagtttacacccgatccactggggagcaggaaatatctgtgggcttgtga

SEQ ID NO: 182 - DNA, 1125 bp, Artificial Sequence
  Description of Artificial Sequence: Synthetic polynucleotide
atgctgtccacatctcgttctcggtttatcagaaataccaacgagagcggtgaagaagtcaccaccttttttgattatgattacggtgctccctgtcataaatttgacgtgaagcaaattggggcccaactcctgcctccgctctactcgctggtgttcatctttggttttgtgggcaacatgctggtcgtcctcatcttaataaactgcaaaaagctgaagtgcttgactgacatttacctgctcaacctggccatctctgatctgctttttcttattactctcccattgtgggctcactctgctgcaaatgagtgggtctttgggaatgcaatgtgcaaattattcacagggctgtatcacatcggttattttggcggaatcttcttcatcatcctcctgacaatcgatagatacctggctattgtccatgctgtgtttgctttaaaagccaggacggtcacctttggggtggtgacaagtgtgatcacctggttggtggctgtgtttgcttctgtcccaggaatcatctttactaaatgccagaaagaagattctgtttatgtctgtggcccttattttccacgaggatggaataatttccacacaataatgaggaacattttggggctggtcctgccgctgctcatcatggtcatctgctactcgggaatcctgaaaaccctgcttcggtgtcgaaacgagaagaagaggcatagggcagtgagagtcatcttcaccatcatgattgtttactttctcttctggactccctataatattgtcattctcctgaacaccttccaggaattcttcggcctgagtaactgtgaaagcaccagtcaactggaccaagccacgcaggtgacagagactcttgggatgactcactgctgcatcaatcccatcatctatgccttcgttggggagaagttcagaagcctttttcacatagctcttggctgtaggattgccccactccaaaaaccagtgtgtggaggtccaggagtgagaccaggaaagaatgtgaaagtgactacacaaggactcctcgatggtcgtggaaaaggaaagtcaattggcagagcccctgaagccagtcttcaggacaaagaaggagcctag

SEQ ID NO: 183 - protein, 26 aa, Artificial Sequence
  Description of Artificial Sequence: Synthetic peptide
SGGGSGGGGSGGGGSGGGGSGGGSLQ

SEQ ID NO: 184 - protein, 254 aa, Artificial Sequence
  Description of Artificial Sequence: Synthetic polypeptide
MWQLLLPTALLLLVSAGMRTEDLPKAVVFLEPQWYRVLEKDSVTLKCQGAYSPEDNSTQWFHNESLISSQASSYFIDAATVDDSGEYRCQTNLSTLSDPVQLEVHIGWLLLQAPRWVFKEEDPIHLRCHSWKNTALHKVTYLQNGKGRKYFHHNSDFYIPKATLKDSGSYFCRGLVGSKNVSSETVNITITQGLAVSTISSFFPPGYQVSFCLVMVLLFAVDTGLYFSVKTNIRSSTRDWKDHKFKWRKDPQDK

SEQ ID NO: 185 - protein, 323 aa, Artificial Sequence
  Description of Artificial Sequence: Synthetic polypeptide
MWPLVAALLLGSACCGSAQLLFNKTKSVEFTFCNDTVVIPCFVTNMEAQNTTEVYVKWKFKGRDIYTFDGALNKSTVPTDFSSAKIEVSQLLKGDASLKMDKSDAVSHTGNYTCEVTELTREGETIIELKYRVVSWFSPNENILIVIFPIFAILLFWGQFGIKTLKYRSGGMDEKTIALLVAGLVITVIVIVGAILFVPGEYSLKNATGLGLIVTSTGILILLHYYVFSTAIGLTSFVIAILVIQVIAYILAVVGLSLCIAACIPMHGPLLISGLSILALAQLLGLVYMKFVASNQKTIQPPRKAVEEPLNAFKESKGMMNDE

SEQ ID NO: 186 - protein, 114 aa, Artificial Sequence
  Description of Artificial Sequence: Synthetic polypeptide
NWVNVISDLKKIEDLIQSMHIDATLYTESDVHPSCKVTAMKCFLLELQVISLESGDASIHDTVENLIILANNSLSSNGNVTESGCKECEELEEKNIKEFLQSFVHIVQMFINTS

SEQ ID NO: 187 - protein, 132 aa, Artificial Sequence
  Description of Artificial Sequence: Synthetic polypeptide
MDWTWILFLVAAATRVHSNWVNVISDLKKIEDLIQSMHIDATLYTESDVHPSCKVTAMKCFLLELQVISLESGDASIHDTVENLIILANNSLSSNGNVTESGCKECEELEEKNIKEFLQSFVHIVQMFINTS

SEQ ID NO: 188 - protein, 151 aa, Artificial Sequence
  Description of Artificial Sequence: Synthetic polypeptide
MDWTWILFLVAAATRVHSGIHVFILGCFSAGLPKTEANWVNVISDLKKIEDLIQSMHIDATLYTESDVHPSCKVTAMKCFLLELQVISLESGDASIHDTVENLIILANNSLSSNGNVTESGCKECEELEEKNIKEFLQSFVHIVQMFINTS

SEQ ID NO: 189 - protein, 237 aa, Artificial Sequence
  Description of Artificial Sequence: Synthetic polypeptide
ITCPPPMSVEHADIWVKSYSLYSRERYICNSGFKRKAGTSSLTECVLNKATNVAHWTTPSLKCIRDPALVHQRPAPPSTVTTAGVTPQPESLSPSGKEPAASSPSSNNTAATTAAIVPGSQLMPSKSPSTGTTEISSHESSHGTPSQTTAKNWELTASASHQPPGVYPQGHSDTTVAISTSTVLLCGLSAVSLLACYLKSRQTPPLASVEMEAMEALPVTWGTSSRDEDLENCSHHL

SEQ ID NO: 190 - protein, 395 aa, Artificial Sequence [sequence omitted]

SEQ ID NO: 191 - protein, 414 aa, Artificial Sequence
  Description of Artificial Sequence: Synthetic polypeptide
MDWTWILFLVAAATRVHSGIHVFILGCFSAGLPKTEANWVNVISDLKKIEDLIQSMHIDATLYTESDVHPSCKVTAMKCFLLELQVISLESGDASIHDTVENLIILANNSLSSNGNVTESGCKECEELEEKNIKEFLQSFVHIVQMFINTSSGGGSGGGGSGGGGSGGGGSGGGSLQITCPPPMSVEHADIWVKSYSLYSRERYICNSGFKRKAGTSSLTECVLNKATNVAHWTTPSLKCIRDPALVHQRPAPPSTVTTAGVTPQPESLSPSGKEPAASSPSSNNTAATTAAIVPGSQLMPSKSPSTGTTEISSHESSHGTPSQTTAKNWELTASASHQPPGVYPQGHSDTTVAISTSTVLLCGLSAVSLLACYLKSRQTPPLASVEMEAMEALPVTWGTSSRDEDLENCSHHL

SEQ ID NO: 192 - protein, 671 aa, Artificial Sequence
  Description of Artificial Sequence: Synthetic polypeptide
MWQLLLPTALLLLVSAGMRTEDLPKAVVFLEPQWYRVLEKDSVTLKCQGAYSPEDNSTQWFHNESLISSQASSYFIDAATVDDSGEYRCQTNLSTLSDPVQLEVHIGWLLLQAPRWVFKEEDPIHLRCHSWKNTALHKVTYLQNGKGRKYFHHNSDFYIPKATLKDSGSYFCRGLVGSKNVSSETVNITITQGLAVSTISSFFPPGYQVSFCLVMVLLFAVDTGLYFSVKTNIRSSTRDWKDHKFKWRKDPQDKGSGATNFSLLKQAGDVEENPGPMDWTWILFLVAAATRVHSNWVNVISDLKKIEDLIQSMHIDATLYTESDVHPSCKVTAMKCFLLELQVISLESGDASIHDTVENLIILANNSLSSNGNVTESGCKECEELEEKNIKEFLQSFVHIVQMFINTSSGGGSGGGGSGGGGSGGGGSGGGSLQITCPPPMSVEHADIWVKSYSLYSRERYICNSGFKRKAGTSSLTECVLNKATNVAHWTTPSLKCIRDPALVHQRPAPPSTVTTAGVTPQPESLSPSGKEPAASSPSSNNTAATTAAIVPGSQLMPSKSPSTGTTEISSHESSHGTPSQTTAKNWELTASASHQPPGVYPQGHSDTTVAISTSTVLLCGLSAVSLLACYLKSRQTPPLASVEMEAMEALPVTWGTSSRDEDLENCSHHL

SEQ ID NO: 193 - protein, 489 aa, Artificial Sequence
  Description of Artificial Sequence: Synthetic polypeptide
MLLLVTSLLLCELPHPAFLLIPDIQMTQTTSSLSASLGDRVTISCRASQDISKYLNWYQQKPDGTVKLLIYHTSRLHSGVPSRFSGSGSGTDYSLTISNLEQEDIATYFCQQGNTLPYTFGGGTKLEITGSTSGSGKPGSGEGSTKGEVKLQESGPGLVAPSQSLSVTCTVSGVSLPDYGVSWIRQPPRKGLEWLGVIWGSETTYYNSALKSRLTIIKDNSKSQVFLKMNSLQTDDTAIYYCAKHYYYGGSYAMDYWGQGTSVTVSSAAAIEVMYPPPYLDNEKSNGTIIHVKGKHLCPSPLFPGPSKPFWVLVVVGGVLACYSLLVTVAFIIFWVRSKRSRLLHSDYMNMTPRRPGPTRKHYQPYAPPRDFAAYRSRVKFSRSADAPAYQQGQNQLYNELNLGRREEYDVLDKRRGRDPEMGGKPRRKNPQEGLYNELQKDKMAEAYSEIGMKGERRRGKGHDGLYQGLSTATKDTYDALHMQALPPR

SEQ ID NO: 194 - protein, 494 aa, Artificial Sequence
  Description of Artificial Sequence: Synthetic polypeptide
MALPVTALLLPLALLLHAARPMDEVQLVESGGGLVQPGGSLRLSCAASGFSFTNYGVHWVRQAPGKGLEWVSVIWSGGNTDYNTSVKGRFTISRDNSKNTLYLQMNSLRAEDTAVYYCARALTYYDYEFAYWGQGTLVTVSSGGGGSGGGGSGGGGSEIVLTQSPATLSLSPGERATLSCRASQSIGTNIHWYQQKPGQAPRLLIYYASESISGIPARFSGSGSGTDFTLTISSLEPEDFAVYYCQQNNNWPTTFGQGTKLEIKGSLEAAATTTPAPRPPTPAPTIASQPLSLRPEACRPAAGGAVHTRGLDFACDIYIWAPLAGTCGVLLLSLVITLYCKRGRKKLLYIFKQPFMRPVQTTQEEDGCSCRFPEEEEGGCELRVKFSRSADAPAYQQGQNQLYNELNLGRREEYDVLDKRRGRDPEMGGKPRRKNPQEGLYNELQKDKMAEAYSEIGMKGERRRGKGHDGLYQGLSTATKDTYDALHMQALPPR

SEQ ID NO: 195 - protein, 239 aa, Artificial Sequence
  Description of Artificial Sequence: Synthetic polypeptide
MVSKGEELFTGVVPILVELDGDVNGHKFSVSGEGEGDATYGKLTLKFICTTGKLPVPWPTLVTTLTYGVQCFSRYPDHMKQHDFFKSAMPEGYVQERTIFFKDDGNYKTRAEVKFEGDTLVNRIELKGIDFKEDGNILGHKLEYNYNSHNVYIMADKQKNGIKVNFKIRHNIEDGSVQLADHYQQNTPIGDGPVLLPDNHYLSTQSALSKDPNEKRDHMVLLEFVTAAGITLGMDELYK

SEQ ID NO: 196 - protein, 350 aa, Artificial Sequence
  Description of Artificial Sequence: Synthetic polypeptide
MSNITDPQMWDFDDLNFTGMPPADEDYSPCMLETETLNKYVVIIAYALVFLLSLLGNSLVMLVILYSRVGRSVTDVYLLNLALADLLFALTLPIWAASKVNGWIFGTFLCKVVSLLKEVNFYSGILLLACISVDRYLAIVHATRTLTQKRHLVKFVCLGCWGLSMNLSLPFFLFRQAYHPNNSSPVCYEVLGNDTAKWRMVLRILPHTFGFIVPLFVMLFCYGFTLRTLFKAHMGQKHRAMRVIFAVVLIFLLCWLPYNLVLLADTLMRTQVIQESCERRNNIGRALDATEILGFLHSCLNPIIYAFIGQNFRHGFLKILAMHGLVSKEFLARHRVTSYTSSSVNVSSNL

SEQ ID NO: 197 - protein, 415 aa, Artificial Sequence
  Description of Artificial Sequence: Synthetic polypeptide
MELRKYGPGRLAGTVIGGAAQSKSQTKSDSITKEFLPGLYTAPSSPFPPSQVSDHQVLNDAEVAALLENFSSSYDYGENESDSCCTSPPCPQDFSLNFDRAFLPALYSLLFLLGLLGNGAVAAVLLSRRTALSSTDTFLLHLAVADTLLVLTLPLWAVDAAVQWVFGSGLCKVAGALFNINFYAGALLLACISFDRYLNIVHATQLYRRGPPARVTLTCLAVWGLCLLFALPDFIFLSAHHDERLNATHCQYNFPQVGRTALRVLQLVAGFLLPLLVMAYCYAHILAVLLVSRGQRRLRAMRLVVVVVVAFALCWTPYHLVVLVDILMDLGALARNCGRESRVDVAKSVTSGLGYMHCCLNPLLYAFVGVKFRERMWMLLLRLGCPNQRGLQRQPSSSRRDSSWSETSEASYSGL

SEQ ID NO: 198 - protein, 368 aa, Artificial Sequence
  Description of Artificial Sequence: Synthetic polypeptide
MVLEVSDHQVLNDAEVAALLENFSSSYDYGENESDSCCTSPPCPQDFSLNFDRAFLPALYSLLFLLGLLGNGAVAAVLLSRRTALSSTDTFLLHLAVADTLLVLTLPLWAVDAAVQWVFGSGLCKVAGALFNINFYAGALLLACISFDRYLNIVHATQLYRRGPPARVTLTCLAVWGLCLLFALPDFIFLSAHHDERLNATHCQYNFPQVGRTALRVLQLVAGFLLPLLVMAYCYAHILAVLLVSRGQRRLRAMRLVVVVVVAFALCWTPYHLVVLVDILMDLGALARNCGRESRVDVAKSVTSGLGYMHCCLNPLLYAFVGVKFRERMWMLLLRLGCPNQRGLQRQPSSSRRDSSWSETSEASYSGL

SEQ ID NO: 199 - protein, 352 aa, Artificial Sequence [sequence omitted]

SEQ ID NO: 200 - protein, 374 aa, Artificial Sequence
  Description of Artificial Sequence: Synthetic polypeptide
MLSTSRSRFIRNTNESGEEVTTFFDYDYGAPCHKFDVKQIGAQLLPPLYSLVFIFGFVGNMLVVLILINCKKLKCLTDIYLLNLAISDLLFLITLPLWAHSAANEWVFGNAMCKLFTGLYHIGYFGGIFFIILLTIDRYLAIVHAVFALKARTVTFGVVTSVITWLVAVFASVPGIIFTKCQKEDSVYVCGPYFPRGWNNFHTIMRNILGLVLPLLIMVICYSGILKTLLRCRNEKKRHRAVRVIFTIMIVYFLFWTPYNIVILLNTFQEFFGLSNCESTSQLDQATQVTETLGMTHCCINPIIYAFVGEKFRSLFHIALGCRIAPLQKPVCGGPGVRPGKNVKVTTQGLLDGRGKGKSIGRAPEASLQDKEGA

SEQ ID NO: 201 - DNA, 2456 bp, Artificial Sequence
  Description of Artificial Sequence: Synthetic polynucleotide
cctgcaggcagctgcgcgctcgctcgctcactgaggccgcccgggcaaagcccgggcgtcgggcgacctttggtcgcccggcctcagtgagcgagcgagcgcgcagagagggagtggccaactccatcactaggggttcctgtcgacgaagactgtggatggcccctccgggaaactgtggcgtgatggccgcggggctctccagaacatcatccctgcctctactggcgctgccaaggctgtgggcaaggtcatccctgagctgaacgggaagctcactggcatggccttccgtgtccccactgccaacgtgtcagtggtggacctgacctgccgtctagaaaaacctgccaaatatgatgacatcaagaaggtggtgaagcaggcgtcggagggccccctcaagggcatcctgggctacactgagcaccaggtggtctcctctgacttcaacagcgacacccactcctccacctttgacgctggggctggcattgccctcaacgaccactttgtcaagctcatttcctggtatgtggctggggccagagactggctcttaaaaagtgcagggtctggcgccctctggtggctggctcagaaaaagggccctgacaactctttacatcttctaggtatgacaacgagttcggatatagcaatagagtggtcgatctgatggctcatatggctagcaaagagggaagcggagctactaacttcagcctgctgaagcaggctggagacgtggaggagaaccctggacctatgtggcaactgctgctgcctacagctctgctgcttctggtgtctgccggcatgagaaccgaggatctgcctaaggccgtggtgttcctggaacctcagtggtacagagtgctggaaaaggacagcgtgaccctgaagtgccagggcgcctattctcccgaggacaatagcacccagtggttccacaacgagagcctgatcagcagccaggccagcagctactttatcgatgccgccaccgtggacgacagcggcgagtacagatgccagaccaatctgagcaccctgagcgaccctgtgcagctggaagtgcacattggatggttgctgctgcaagcccctagatgggtgttcaaagaagaggaccccatccacctgagatgccactcttggaagaacacagccctgcacaaagtgacctacctgcagaacggcaagggcagaaagtacttccaccacaacagcgacttctacatccccaaggccacactgaaggactccggctcctacttctgcagaggcctggtcggcagcaagaacgtgtccagcgagacagtgaacatcaccatcacacagggcctcgccgtgtctaccatcagcagctttttcccacctggctatcaggtgtccttctgcctggtcatggtgctgctgttcgccgtggataccggcctgtacttcagcgtcaagaccaacatccggtccagcaccagagactggaaggaccacaagttcaagtggcggaaggaccctcaggacaagtaagcggccgcgtcgagtctagagggcccgtttaaacccgctgatcagcctcgactgtgccttctagttgccagccatctgttgtttgcccctcccccgtgccttccttgaccctggaaggtgccactcccactgtcctttcctaataaaatgaggaaattgcatcgcattgtctgagtaggtgtcattctattctggggggtggggtggggcaggacagcaagggggaggattgggaagacaatagcaggcatgctggggatgcggtgggctctatggatttggctacagcaacagggtggtggacctcatggcccacatggcctccaaggagtaagacccctggaccaccagccccagcaagagcacaagaggaagagagagaccctcactgctggggagtccctgccacactcagtcccccaccacactgaatctcccctcctcacagttgccatgtagaccccttgaagaggggaggggcctagggagccgcaccttgtcatgtaccatcaataaagtaccctgtgctcaaccagttacttgtcctgtcttattctagggtctggggcagaggggagggaagctgggcttgtgtcaaggtgagacattcttgctggggagggacctggtatgttctcctcagactgagggtagggcctccaaacagccttgcttgcttcgagaaccatttgcttcccgctcagacgtcttgagtgctacaggaagctggcaccactacttcagagaacaaggccttttcctctcctcgctccagtagatctaggaacccctagtgatggagttggccactccctctctgcgcgctcgctcgctcactgaggccgggcgaccaaaggtcgcccgacgcccgggctttgcccgggcggcctcagtgagcgagcgagcgcgcagctgcctgcagg

SEQ ID NO: 202 - DNA, 2411 bp, Artificial Sequence
  Description of Artificial Sequence: Synthetic polynucleotide
cctgcaggcagctgcgcgctcgctcgctcactgaggccgcccgggcaaagcccgggcgtcgggcgacctttggtcgcccggcctcagtgagcgagcgagcgcgcagagagggagtggccaactccatcactaggggttcctgtcgacgaagactgtggatggcccctccgggaaactgtggcgtgatggccgcggggctctccagaacatcatccctgcctctactggcgctgccaaggctgtgggcaaggtcatccctgagctgaacgggaagctcactggcatggccttccgtgtccccactgccaacgtgtcagtggtggacctgacctgccgtctagaaaaacctgccaaatatgatgacatcaagaaggtggtgaagcaggcgtcggagggccccctcaagggcatcctgggctacactgagcaccaggtggtctcctctgacttcaacagcgacacccactcctccacctttgacgctggggctggcattgccctcaacgaccactttgtcaagctcatttcctggtatgtggctggggccagagactggctcttaaaaagtgcagggtctggcgccctctggtggctggctcagaaaaagggccctgacaactctttacatcttctaggtatgacaacgagttcggatatagcaatagagtggtcgatctgatggctcatatggctagcaaagagggaagcggagctactaacttcagcctgctgaagcaggctggagacgtggaggagaaccctggacctatggtgagcaagggcgaggagctgttcaccggggtggtgcccatcctggtcgagctggacggcgacgtaaacggccacaagttcagcgtgtccggcgagggcgagggcgatgccacctacggcaagctgaccctgaagttcatctgcaccaccggcaagctgcccgtgccctggcccaccctcgtgaccaccctgacctacggcgtgcagtgcttcagccgctaccccgaccacatgaagcagcacgacttcttcaagtccgccatgcccgaaggctacgtccaggagcgcaccatcttcttcaaggacgacggcaactacaagacccgcgccgaggtgaagttcgagggcgacaccctggtgaaccgcatcgagctgaagggcatcgacttcaaggaggacggcaacatcctggggcacaagctggagtacaactacaacagccacaacgtctatatcatggccgacaagcagaagaacggcatcaaggtgaacttcaagatccgccacaacatcgaggacggcagcgtgcagctcgccgaccactaccagcagaacacccccatcggcgacggccccgtgctgctgcccgacaaccactacctgagcacccagtccgccctgagcaaagaccccaacgagaagcgcgatcacatggtcctgctggagttcgtgaccgccgccgggatcactctcggcatggacgagctgtacaagtgagcggccgcgtcgagtctagagggcccgtttaaacccgctgatcagcctcgactgtgccttctagttgccagccatctgttgtttgcccctcccccgtgccttccttgaccctggaaggtgccactcccactgtcctttcctaataaaatgaggaaattgcatcgcattgtctgagtaggtgtcattctattctggggggtggggtggggcaggacagcaagggggaggattgggaagacaatagcaggcatgctggggatgcggtgggctctatggatttggctacagcaacagggtggtggacctcatggcccacatggcctccaaggagtaagacccctggaccaccagccccagcaagagcacaagaggaagagagagaccctcactgctggggagtccctgccacactcagtcccccaccacactgaatctcccctcctcacagttgccatgtagaccccttgaagaggggaggggcctagggagccgcaccttgtcatgtaccatcaataaagtaccctgtgctcaaccagttacttgtcctgtcttattctagggtctggggcagaggggagggaagctgggcttgtgtcaaggtgagacattcttgctggggagggacctggtatgttctcctcagactgagggtagggcctccaaacagccttgcttgcttcgagaaccatttgcttcccgctcagacgtcttgagtgctacaggaagctggcaccactacttcagagaacaaggccttttcctctcctcgctccagtagatctaggaacccctagtgatggagttggccactccctctctgcgcgctcgctcgctcactgaggccgggcgaccaaaggtcgcccgacgcccgggctttgcccgggcggcctcagtgagcgagcgagcgcgcagctgcctgcagg

SEQ ID NO: 203 - DNA, 3162 bp, Artificial Sequence
  Description of Artificial Sequence: Synthetic polynucleotide
cctgcaggcagctgcgcgctcgctcgctcactgaggccgcccgggcaaagcccgggcgtcgggcgacctttggtcgcccggcctcagtgagcgagcgagcgcgcagagagggagtggccaactccatcactaggggttcctgtcgacgaagactgtggatggcccctccgggaaactgtggcgtgatggccgcggggctctccagaacatcatccctgcctctactggcgctgccaaggctgtgggcaaggtcatccctgagctgaacgggaagctcactggcatggccttccgtgtccccactgccaacgtgtcagtggtggacctgacctgccgtctagaaaaacctgccaaatatgatgacatcaagaaggtggtgaagcaggcgtcggagggccccctcaagggcatcctgggctacactgagcaccaggtggtctcctctgacttcaacagcgacacccactcctccacctttgacgctggggctggcattgccctcaacgaccactttgtcaagctcatttcctggtatgtggctggggccagagactggctcttaaaaagtgcagggtctggcgccctctggtggctggctcagaaaaagggccctgacaactctttacatcttctaggtatgacaacgagttcggatatagcaatagagtggtcgatctgatggctcatatggctagcaaagagggaagcggagctactaacttcagcctgctgaagcaggctggagacgtggaggagaaccctggacctatgcttctcctggtgacaagccttctgctctgtgagttaccacacccagcattcctcctgatcccagacatccagatgacacagactacatcctccctgtctgcctctctgggagacagagtcaccatcagttgcagggcaagtcaggacattagtaaatatttaaattggtatcagcagaaaccagatggaactgttaaactcctgatctaccatacatcaagattacactcaggagtcccatcaaggttcagtggcagtgggtctggaacagattattctctcaccattagcaacctggagcaagaagatattgccacttacttttgccaacagggtaatacgcttccgtacacgttcggaggggggactaagttggaaataacaggctccacctctggatccggcaagcccggatctggcgagggatccaccaagggcgaggtgaaactgcaggagtcaggacctggcctggtggcgccctcacagagcctgtccgtcacatgcactgtctcaggggtctcattacccgactatggtgtaagctggattcgccagcctccacgaaagggtctggagtggctgggagtaatatggggtagtgaaaccacatactataattcagctctcaaatccagactgaccatcatcaaggacaactccaagagccaagttttcttaaaaatgaacagtctgcaaactgatgacacagccatttactactgtgccaaacattattactacggtggtagctatgctatggactactggggtcaaggaacctcagtcaccgtctcctcagcggccgcaattgaagttatgtatcctcctccttacctagacaatgagaagagcaatggaaccattatccatgtgaaagggaaacacctttgtccaagtcccctatttcccggaccttctaagcccttttgggtgctggtggtggttgggggagtcctggcttgctatagcttgctagtaacagtggcctttattattttctgggtgaggagtaagaggagcaggctcctgcacagtgactacatgaacatgactccccgccgccccgggcccacccgcaagcattaccagccctatgccccaccacgcgacttcgcagcctatcgctccagagtgaagttcagcaggagcgcagacgcccccgcgtaccagcagggccagaaccagctctataacgagctcaatctaggacgaagagaggagtacgatgttttggacaagagacgtggccgggaccctgagatggggggaaagccgagaaggaagaaccctcaggaaggcctgtacaatgaactgcagaaagataagatggcggaggcctacagtgagattgggatgaaaggcgagcgccggaggggcaaggggcacgatggcctttaccagggtctcagtacagccaccaaggacacctacgacgcccttcacatgcaggccctgccccctcgctaaagcggccgcgtcgagtctagagggcccgtttaaacccgctgatcagcctcgactgtgccttctagttgccagccatctgttgtttgcccctcccccgtgccttccttgaccctggaaggtgccactcccactgtcctttcctaataaaatgaggaaattgcatcgcattgtctgagtaggtgtcattctattctggggggtggggtggggcaggacagcaagggggaggattgggaagacaatagcaggcatgctggggatgcggtgggctctatggatttggctacagcaacagggtggtggacctcatggcccacatggcctccaaggagtaagacccctggaccaccagccccagcaagagcacaagaggaagagagagaccctcactgctggggagtccctgccacactcagtcccccaccacactgaatctcccctcctcacagttgccatgtagaccccttgaagaggggaggggcctagggagccgcaccttgtcatgtaccatcaataaagtaccctgtgctcaaccagttacttgtcctgtcttattctagggtctggggcagaggggagggaagctgggcttgtgtcaaggtgagacattcttgctggggagggacctggtatgttctcctcagactgagggtagggcctccaaacagccttgcttgcttcgagaaccatttgcttcccgctcagacgtcttgagtgctacaggaagctggcaccactacttcagagaacaaggccttttcctctcctcgctccagtagatctaggaacccctagtgatggagttggccactccctctctgcgcgctcgctcgctcactgaggccgggcgaccaaaggtcgcccgacgcccgggctttgcccgggcggcctcagtgagcgagcgagcgcgcagctgcctgcagg

SEQ ID NO: 204 - DNA, 3177 bp, Artificial Sequence
  Description of Artificial Sequence: Synthetic polynucleotide
cctgcaggcagctgcgcgctcgctcgctcactgaggccgcccgggcaaagcccgggcgtcgggcgacctttggtcgcccggcctcagtgagcgagcgagcgcgcagagagggagtggccaactccatcactaggggttcctgtcgacgaagactgtggatggcccctccgggaaactgtggcgtgatggccgcggggctctccagaacatcatccctgcctctactggcgctgccaaggctgtgggcaaggtcatccctgagctgaacgggaagctcactggcatggccttccgtgtccccactgccaacgtgtcagtggtggacctgacctgccgtctagaaaaacctgccaaatatgatgacatcaagaaggtggtgaagcaggcgtcggagggccccctcaagggcatcctgggctacactgagcaccaggtggtctcctctgacttcaacagcgacacccactcctccacctttgacgctggggctggcattgccctcaacgaccactttgtcaagctcatttcctggtatgtggctggggccagagactggctcttaaaaagtgcagggtctggcgccctctggtggctggctcagaaaaagggccctgacaactctttacatcttctaggtatgacaacgagttcggatatagcaatagagtggtcgatctgatggctcatatggctagcaaagagggaagcggagctactaacttcagcctgctgaagcaggctggagacgtggaggagaaccctggacctatggcactccccgtcaccgcccttctcttgcccctcgccctgctgctgcatgctgccaggcccatggacgaagtgcagctcgtggagtccggtggaggactcgtccaaccgggcggatcccttcgcttgtcctgcgccgcatcaggcttcagcttcaccaactatggcgtccactgggtcagacaggcccccggaaagggactggaatgggtgtccgtgatctggagcggcgggaacaccgactacaacacctccgtgaagggccggttcactattagccgcgacaactccaagaacactctgtacctccaaatgaactccctgagggccgaagatactgctgtgtactattgcgcgagagccctgacctactacgactacgagttcgcgtactggggccaggggactctcgtgaccgtgtccagcggtggtggaggttccggaggcggaggttctggtggcgggggatcagaaatcgtgctgactcagtcccctgcgaccttgtccctgagccctggagaacgggccaccctgagctgtagagccagccagagcatcgggacaaatattcactggtaccagcagaaacccggacaagcaccacggctgctgatctactacgcctccgagtcgatttccggaatcccggctcgcttttcggggtctggatcgggaacggacttcactctgaccatctcgtcgctggaacccgaggatttcgccgtgtactactgccaacagaacaacaattggccgaccacgttcggccagggcaccaagctcgagattaagggatcactggaagcggccgcaaccacaacacctgctccaaggccccccacacccgctccaactatagccagccaaccattgagcctcagacctgaagcttgcaggcccgcagcaggaggcgccgtccatacgcgaggcctggacttcgcgtgtgatatttatatttgggcccctttggccggaacatgtggggtgttgcttctctcccttgtgatcactctgtattgtaagcgcgggagaaagaagctcctgtacatcttcaagcagccttttatgcgacctgtgcaaaccactcaggaagaagatgggtgttcatgccgcttccccgaggaggaagaaggagggtgtgaactgagggtgaaattttctagaagcgccgatgctcccgcatatcagcagggtcagaatcagctctacaatgaattgaatctcggcaggcgagaagagtacgatgttctggacaagagacggggcagggatcccgagatggggggaaagccccggagaaaaaatcctcaggaggggttgtacaatgagctgcagaaggacaagatggctgaagcctatagcgagatcggaatgaaaggcgaaagacgcagaggcaaggggcatgacggtctgtaccagggtctctctacagccaccaaggacacttatgatgcgttgcatatgcaagccttgccaccccgctaaagcggccgcgtcgagtctagagggcccgtttaaacccgctgatcagcctcgactgtgccttctagttgccagccatctgttgtttgcccctcccccgtgccttccttgaccctggaaggtgccactcccactgtcctttcctaataaaatgaggaaattgcatcgcattgtctgagtaggtgtcattctattctggggggtggggtggggcaggacagcaagggggaggattgggaagacaatagcaggcatgctggggatgcggtgggctctatggatttggctacagcaacagggtggtggacctcatggcccacatggcctccaaggagtaagacccctggaccaccagccccagcaagagcacaagaggaagagagagaccctcactgctggggagtccctgccacactcagtcccccaccacactgaatctcccctcctcacagttgccatgtagaccccttgaagaggggaggggcctagggagccgcaccttgtcatgtaccatcaataaagtaccctgtgctcaaccagttacttgtcctgtcttattctagggtctggggcagaggggagggaagctgggcttgtgtcaaggtgagacattcttgctggggagggacctggtatgttctcctcagactgagggtagggcctccaaacagccttgcttgcttcgagaaccatttgcttcccgctcagacgtcttgagtgctacaggaagctggcaccactacttcagagaacaaggccttttcctctcctcgctccagtagatctaggaacccctagtgatggagttggccactccctctctgcgcgctcgctcgctcactgaggccgggcgaccaaaggtcgcccgacgcccgggctttgcccgggcggcctcagtgagcgagcgagcgcgcagctgcctgcagg

SEQ ID NO: 205 - DNA, 2162 bp, Artificial Sequence
  Description of Artificial Sequence: Synthetic polynucleotide
gaagactgtggatggcccctccgggaaactgtggcgtgatggccgcggggctctccagaacatcatccctgcctctactggcgctgccaaggctgtgggcaaggtcatccctgagctgaacgggaagctcactggcatggccttccgtgtccccactgccaacgtgtcagtggtggacctgacctgccgtctagaaaaacctgccaaatatgatgacatcaagaaggtggtgaagcaggcgtcggagggccccctcaagggcatcctgggctacactgagcaccaggtggtctcctctgacttcaacagcgacacccactcctccacctttgacgctggggctggcattgccctcaacgaccactttgtcaagctcatttcctggtatgtggctggggccagagactggctcttaaaaagtgcagggtctggcgccctctggtggctggctcagaaaaagggccctgacaactctttacatcttctaggtatgacaacgagttcggatatagcaatagagtggtcgatctgatggctcatatggctagcaaagagggaagcggagctactaacttcagcctgctgaagcaggctggagacgtggaggagaaccctggacctatgtggcaactgctgctgcctacagctctgctgcttctggtgtctgccggcatgagaaccgaggatctgcctaaggccgtggtgttcctggaacctcagtggtacagagtgctggaaaaggacagcgtgaccctgaagtgccagggcgcctattctcccgaggacaatagcacccagtggttccacaacgagagcctgatcagcagccaggccagcagctactttatcgatgccgccaccgtggacgacagcggcgagtacagatgccagaccaatctgagcaccctgagcgaccctgtgcagctggaagtgcacattggatggttgctgctgcaagcccctagatgggtgttcaaagaagaggaccccatccacctgagatgccactcttggaagaacacagccctgcacaaagtgacctacctgcagaacggcaagggcagaaagtacttccaccacaacagcgacttctacatccccaaggccacactgaaggactccggctcctacttctgcagaggcctggtcggcagcaagaacgtgtccagcgagacagtgaacatcaccatcacacagggcctcgccgtgtctaccatcagcagctttttcccacctggctatcaggtgtccttctgcctggtcatggtgctgctgttcgccgtggataccggcctgtacttcagcgtcaagaccaacatccggtccagcaccagagactggaaggaccacaagttcaagtggcggaaggaccctcaggacaagtaagcggccgcgtcgagtctagagggcccgtttaaacccgctgatcagcctcgactgtgccttctagttgccagccatctgttgtttgcccctcccccgtgccttccttgaccctggaaggtgccactcccactgtcctttcctaataaaatgaggaaattgcatcgcattgtctgagtaggtgtcattctattctggggggtggggtggggcaggacagcaagggggaggattgggaagacaatagcaggcatgctggggatgcggtgggctctatggatttggctacagcaacagggtggtggacctcatggcccacatggcctccaaggagtaagacccctggaccaccagccccagcaagagcacaagaggaagagagagaccctcactgctggggagtccctgccacactcagtcccccaccacactgaatctcccctcctcacagttgccatgtagaccccttgaagaggggaggggcctagggagccgcaccttgtcatgtaccatcaataaagtaccctgtgctcaaccagttacttgtcctgtcttattctagggtctggggcagaggggagggaagctgggcttgtgtcaaggtgagacattcttgctggggagggacctggtatgttctcctcagactgagggtagggcctccaaacagccttgcttgcttcgagaaccatttgcttcccgctcagacgtcttgagtgctacaggaagctggcaccactacttcagagaacaaggccttttcctctcctcgctccagt

SEQ ID NO: 206 - DNA, 2874 bp, Artificial Sequence
  Description of Artificial Sequence: Synthetic polynucleotide
gtcgacgaagactgtggatggcccctccgggaaactgtggcgtgatggccgcggggctctccagaacatcatccctgcctctactggcgctgccaaggctgtgggcaaggtcatccctgagctgaacgggaagctcactggcatggccttccgtgtccccactgccaacgtgtcagtggtggacctgacctgccgtctagaaaaacctgccaaatatgatgacatcaagaaggtggtgaagcaggcgtcggagggccccctcaagggcatcctgggctacactgagcaccaggtggtctcctctgacttcaacagcgacacccactcctccacctttgacgctggggctggcattgccctcaacgaccactttgtcaagctcatttcctggtatgtggctggggccagagactggctcttaaaaagtgcagggtctggcgccctctggtggctggctcagaaaaagggccctgacaactctttacatcttctaggtatgacaacgagttcggatatagcaatagagtggtcgatctgatggctcatatggctagcaaagagggaagcggagctactaacttcagcctgctgaagcaggctggagacgtggaggagaaccctggacctatgcttctcctggtgacaagccttctgctctgtgagttaccacacccagcattcctcctgatcccagacatccagatgacacagactacatcctccctgtctgcctctctgggagacagagtcaccatcagttgcagggcaagtcaggacattagtaaatatttaaattggtatcagcagaaaccagatggaactgttaaactcctgatctaccatacatcaagattacactcaggagtcccatcaaggttcagtggcagtgggtctggaacagattattctctcaccattagcaacctggagcaagaagatattgccacttacttttgccaacagggtaatacgcttccgtacacgttcggaggggggactaagttggaaataacaggctccacctctggatccggcaagcccggatctggcgagggatccaccaagggcgaggtgaaactgcaggagtcaggacctggcctggtggcgccctcacagagcctgtccgtcacatgcactgtctcaggggtctcattacccgactatggtgtaagctggattcgccagcctccacgaaagggtctggagtggctgggagtaatatggggtagtgaaaccacatactataattcagctctcaaatccagactgaccatcatcaaggacaactccaagagccaagttttcttaaaaatgaacagtctgcaaactgatgacacagccatttactactgtgccaaacattattactacggtggtagctatgctatggactactggggtcaaggaacctcagtcaccgtctcctcagcggccgcaattgaagttatgtatcctcctccttacctagacaatgagaagagcaatggaaccattatccatgtgaaagggaaacacctttgtccaagtcccctatttcccggaccttctaagcccttttgggtgctggtggtggttgggggagtcctggcttgctatagcttgctagtaacagtggcctttattattttctgggtgaggagtaagaggagcaggctcctgcacagtgactacatgaacatgactccccgccgccccgggcccacccgcaagcattaccagccctatgccccaccacgcgacttcgcagcctatcgctccagagtgaagttcagcaggagcgcagacgcccccgcgtaccagcagggccagaaccagctctataacgagctcaatctaggacgaagagaggagtacgatgttttggacaagagacgtggccgggaccctgagatggggggaaagccgagaaggaagaaccctcaggaaggcctgtacaatgaactgcagaaagataagatggcggaggcctacagtgagattgggatgaaaggcgagcgccggaggggcaaggggcacgatggcctttaccagggtctcagtacagccaccaaggacacctacgacgcccttcacatgcaggccctgccccctcgctaaagcggccgcgtcgagtctagagggcccgtttaaacccgctgatcagcctcgactgtgccttctagttgccagccatctgttgtttgcccctcccccgtgccttccttgaccctggaaggtgccactcccactgtcctttcctaataaaatgaggaaattgcatcgcattgtctgagtaggtgtcattctattctggggggtggggtggggcaggacagcaagggggaggattgggaagacaatagcaggcatgctggggatgcggtgggctctatggatttggctacagcaacagggtggtggacctcatggcccacatggcctccaaggagtaagacccctggaccaccagccccagcaagagcacaagaggaagagagagaccctcactgctggggagtccctgccacactcagtcccccaccacactgaatctcccctcctcacagttgccatgtagaccccttgaagaggggaggggcctagggagccgcaccttgtcatgtaccatcaataaagtaccctgtgctcaaccagttacttgtcctgtcttattctagggtctggggcagaggggagggaagctgggcttgtgtcaaggtgagacattcttgctggggagggacctggtatgttctcctcagactgagggtagggcctccaaacagccttgcttgcttcgagaaccatttgcttcccgctcagacgtcttgagtgctacaggaagctggcaccactacttcagagaacaaggccttttcctctcctcgctccagt

SEQ ID NO: 207 - DNA, 2889 bp, Artificial Sequence
  Description of Artificial Sequence: Synthetic polynucleotide
gtcgacgaagactgtggatggcccctccgggaaactgtggcgtgatggccgcggggctctccagaacatcatccctgcctctactggcgctgccaaggctgtgggcaaggtcatccctgagctgaacgggaagctcactggcatggccttccgtgtccccactgccaacgtgtcagtggtggacctgacctgccgtctagaaaaacctgccaaatatgatgacatcaagaaggtggtgaagcaggcgtcggagggccccctcaagggcatcctgggctacactgagcaccaggtggtctcctctgacttcaacagcgacacccactcctccacctttgacgctggggctggcattgccctcaacgaccactttgtcaagctcatttcctggtatgtggctggggccagagactggctcttaaaaagtgcagggtctggcgccctctggtggctggctcagaaaaagggccctgacaactctttacatcttctaggtatgacaacgagttcggatatagcaatagagtggtcgatctgatggctcatatggctagcaaagagggaagcggagctactaacttcagcctgctgaagcaggctggagacgtggaggagaaccctggacctatggcactccccgtcaccgcccttctcttgcccctcgccctgctgctgcatgctgccaggcccatggacgaagtgcagctcgtggagtccggtggaggactcgtccaaccgggcggatcccttcgcttgtcctgcgccgcatcaggcttcagcttcaccaactatggcgtccactgggtcagacaggcccccggaaagggactggaatgggtgtccgtgatctggagcggcgggaacaccgactacaacacctccgtgaagggccggttcactattagccgcgacaactccaagaacactctgtacctccaaatgaactccctgagggccgaagatactgctgtgtactattgcgcgagagccctgacctactacgactacgagttcgcgtactggggccaggggactctcgtgaccgtgtccagcggtggtggaggttccggaggcggaggttctggtggcgggggatcagaaatcgtgctgactcagtcccctgcgaccttgtccctgagccctggagaacgggccaccctgagctgtagagccagccagagcatcgggacaaatattcactggtaccagcagaaacccggacaagcaccacggctgctgatctactacgcctccgagtcgatttccggaatcccggctcgcttttcggggtctggatcgggaacggacttcactctgaccatctcgtcgctggaacccgaggatttcgccgtgtactactgccaacagaacaacaattggccgaccacgttcggccagggcaccaagctcgagattaagggatcactggaagcggccgcaaccacaacacctgctccaaggccccccacacccgctccaactatagccagccaaccattgagcctcagacctgaagcttgcaggcccgcagcaggaggcgccgtccatacgcgaggcctggacttcgcgtgtgatatttatatttgggcccctttggccggaacatgtggggtgttgcttctctcccttgtgatcactctgtattgtaagcgcgggagaaagaagctcctgtacatcttcaagcagccttttatgcgacctgtgcaaaccactcaggaagaagatgggtgttcatgccgcttccccgaggaggaagaaggagggtgtgaactgagggtgaaattttctagaagcgccgatgctcccgcatatcagcagggtcagaatcagctctacaatgaattgaatctcggcaggcgagaagagtacgatgttctggacaagagacggggcagggatcccgagatggggggaaagccccggagaaaaaatcctcaggaggggttgtacaatgagctgcagaaggacaagatggctgaagcctatagcgagatcggaatgaaaggcgaaagacgcagaggcaaggggcatgacggtctgtaccagggtctctctacagccaccaaggacacttatgatgcgttgcatatgcaagccttgccaccccgctaaagcggccgcgtcgagtctagagggcccgtttaaacccgctgatcagcctcgactgtgccttctagttgccagccatctgttgtttgcccctcccccgtgccttccttgaccctggaaggtgccactcccactgtcctttcctaataaaatgaggaaattgcatcgcattgtctgagtaggtgtcattctattctggggggtggggtggggcaggacagcaagggggaggattgggaagacaatagcaggcatgctggggatgcggtgggctctatggatttggctacagcaacagggtggtggacctcatggcccacatggcctccaaggagtaagacccctggaccaccagccccagcaagagcacaagaggaagagagagaccctcactgctggggagtccctgccacactcagtcccccaccacactgaatctcccctcctcacagttgccatgtagaccccttgaagaggggaggggcctagggagccgcaccttgtcatgtaccatcaataaagtaccctgtgctcaaccagttacttgtcctgtcttattctagggtctggggcagaggggagggaagctgggcttgtgtcaaggtgagacattcttgctggggagggacctggtatgttctcctcagactgagggtagggcctccaaacagccttgcttgcttcgagaaccatttgcttcccgctcagacgtcttgagtgctacaggaagctggcaccactacttcagagaacaaggccttttcctctcctcgctccagt

SEQ ID NO: 208 - DNA, 3356 bp, Artificial Sequence
  Description of Artificial Sequence: Synthetic polynucleotide
gaagactgtggatggcccctccgggaaactgtggcgtgatggccgcggggctctccagaacatcatccctgcctctactggcgctgccaaggctgtgggcaaggtcatccctgagctgaacgggaagctcactggcatggccttccgtgtccccactgccaacgtgtcagtggtggacctgacctgccgtctagaaaaacctgccaaatatgatgacatcaagaaggtggtgaagcaggcgtcggagggccccctcaagggcatcctgggctacactgagcaccaggtggtctcctctgacttcaacagcgacacccactcctccacctttgacgctggggctggcattgccctcaacgaccactttgtcaagctcatttcctggtatgtggctggggccagagactggctcttaaaaagtgcagggtctggcgccctctggtggctggctcagaaaaagggccctgacaactctttacatcttctaggtatgacaacgagttcggatatagcaatagagtggtcgatctgatggctcatatggctagcaaagagggaagcggagctactaacttcagcctgctgaagcaggctggagacgtggaggagaaccctggacctatggattggacctggatcctgtttctggtggccgctgccacaagagtgcacagcaattgggtcaacgtgatcagcgacctgaagaagatcgaggacctgatccagagcatgcacatcgacgccacactgtacaccgagtccgatgtgcaccctagctgcaaagtgaccgccatgaagtgctttctgctggaactgcaagtgatcagcctggaaagcggcgacgccagcatccacgataccgtggaaaacctgatcatcctggccaacaacagcctgagcagcaacggcaatgtgaccgagagcggctgcaaagagtgcgaggaactggaagagaagaacatcaaagagttcctccagagcttcgtccacatcgtgcagatgttcatcaacaccagcggaagcggagccacaaacttctctctgctgaagcaggcaggagatgttgaagaaaaccctggacctatcacctgtcctccacctatgagcgtggaacacgccgacatctgggtcaagagctacagcctgtacagcagagagcggtacatctgcaacagcggcttcaagagaaaggccggcacaagcagcctgaccgagtgtgtgctgaacaaggccacaaacgtggcccactggaccacacctagcctgaagtgcatcagagatcccgctctggttcatcagaggcctgcccctccatctacagtgacaacagctggcgtgacccctcagcctgagtctctgtctccatctggaaaagagcctgccgccagctctcccagctctaacaatactgctgccaccacagccgctatcgtgcctggatctcagctgatgcctagcaagagccctagcaccggcacaacagagatcagctctcacgagagcagccacggaacaccttctcagaccaccgccaagaattgggagctgacagcctctgcctctcatcagccacctggcgtgtacccacagggccactctgatacaacagtggccatcagcaccagcaccgttctgctgtgtggcctgtctgctgttagcctgctggcctgctacctgaagtctagacagacacctcctctggccagcgtggaaatggaagccatggaagctctgcctgtcacatggggcaccagcagcagagatgaggacctcgagaattgcagccaccacctgggaagcggagccacaaacttctctctgctgaagcaggcaggagatgttgaagaaaaccctggacctatggtgagcaagggcgaggagctgttcaccggggtggtgcccatcctggtcgagctggacggcgacgtaaacggccacaagttcagcgtgtccggcgagggcgagggcgatgccacctacggcaagctgaccctgaagttcatctgcaccaccggcaagctgcccgtgccctggcccaccctcgtgaccaccctgacctacggcgtgcagtgcttcagccgctaccccgaccacatgaagcagcacgacttcttcaagtccgccatgcccgaaggctacgtccaggagcgcaccatcttcttcaaggacgacggcaactacaagacccgcgccgaggtgaagttcgagggcgacaccctggtgaaccgcatcgagctgaagggcatcgacttcaaggaggacggcaacatcctggggcacaagctggagtacaactacaacagccacaacgtctatatcatggccgacaagcagaagaacggcatcaaggtgaacttcaagatccgccacaacatcgaggacggcagcgtgcagctcgccgaccactaccagcagaacacccccatcggcgacggccccgtgctgctgcccgacaaccactacctgagcacccagtccgccctgagcaaagaccccaacgagaagcgcgatcacatggtcctgctggagttcgtgaccgccgccgggatcactctcggcatggacgagctgtacaagtaagcggccgcgtcgagtctagagggcccgtttaaacccgctgatcagcctcgactgtgccttctagttgccagccatctgttgtttgcccctcccccgtgccttccttgaccctggaaggtgccactcccactgtcctttcctaataaaatgaggaaattgcatcgcattgtctgagtaggtgtcattctattctggggggtggggtggggcaggacagcaagggggaggattgggaagacaatagcaggcatgctggggatgcggtgggctctatggatttggctacagcaacagggtggtggacctcatggcccacatggcctccaaggagtaagacccctggaccaccagccccagcaagagcacaagaggaagagagagaccctcactgctggggagtccctgccacactcagtcccccaccacactgaatctcccctcctcacagttgccatgtagaccccttgaagaggggaggggcctagggagccgcaccttgtcatgtaccatcaataaagtaccctgtgctcaaccagttacttgtcctgtcttattctagggtctggggcagaggggagggaagctgggcttgtgtcaaggtgagacattcttgctggggagggacctggtatgttctcctcagactgagggtagggcctccaaacagccttgcttgcttcgagaaccatttgcttcccgctcagacgtcttgagtgctacaggaagctggcaccactacttcagagaacaaggccttttcctctcctcgctccagt

SEQ ID NO: 209 - DNA, 3401 bp, Artificial Sequence
  Description of Artificial Sequence: Synthetic polynucleotide
gaagactgtggatggcccctccgggaaactgtggcgtgatggccgcggggctctccagaacatcatccctgcctctactggcgctgccaaggctgtgggcaaggtcatccctgagctgaacgggaagctcactggcatggccttccgtgtccccactgccaacgtgtcagtggtggacctgacctgccgtctagaaaaacctgccaaatatgatgacatcaagaaggtggtgaagcaggcgtcggagggccccctcaagggcatcctgggctacactgagcaccaggtggtctcctctgacttcaacagcgacacccactcctccacctttgacgctggggctggcattgccctcaacgaccactttgtcaagctcatttcctggtatgtggctggggccagagactggctcttaaaaagtgcagggtctggcgccctctggtggctggctcagaaaaagggccctgacaactctttacatcttctaggtatgacaacgagttcggatatagcaatagagtggtcgatctgatggctcatatggctagcaaagagggaagcggagctactaacttcagcctgctgaagcaggctggagacgtggaggagaaccctggacctatgtggcagctgttgctgccgacagccctcctgttgctggtctccgctggcatgagaaccgaggatctgcctaaggccgtggtgttcctggaacctcagtggtacagagtgctggaaaaggacagcgtgaccctgaagtgccagggcgcctattctcccgaggacaatagcacccagtggttccacaacgagagcctgatcagcagccaggccagcagctactttatcgatgccgccaccgtggacgacagcggcgagtacagatgccagaccaatctgagcaccctgagcgaccctgtgcagctggaagtgcacattggatggttgctgctgcaagcccctagatgggtgttcaaagaagaggaccccatccacctgagatgccactcttggaagaacacagccctgcacaaagtgacctacctgcagaacggcaagggcagaaagtacttccaccacaacagcgacttctacatccccaaggccacactgaaggactccggctcctacttctgcagaggcctggtcggcagcaagaacgtgtccagcgagacagtgaacatcaccatcacacagggcctcgccgtgtctaccatcagcagctttttcccacctggctatcaggtgtccttctgcctggtcatggtgctgctgttcgccgtggataccggcctgtacttcagcgtcaagaccaacatccggtccagcaccagagactggaaggaccacaagttcaagtggcggaaggaccctcaggacaagggaagcggagccacaaacttctctctgctgaagcaggcaggagatgttgaagaaaaccctggacctatggattggacctggatcctgtttctggtggccgctgccacaagagtgcacagcaattgggtcaacgtgatcagcgacctgaagaagatcgaggacctgatccagagcatgcacatcgacgccacactgtacaccgagtccgatgtgcaccctagctgcaaagtgaccgccatgaagtgctttctgctggaactgcaagtgatcagcctggaaagcggcgacgccagcatccacgataccgtggaaaacctgatcatcctggccaacaacagcctgagcagcaacggcaatgtgaccgagagcggctgcaaagagtgcgaggaactggaagagaagaacatcaaagagttcctccagagcttcgtccacatcgtgcagatgttcatcaacaccagcggaagcggagccacaaacttctctctgctgaagcaggcaggagatgttgaagaaaaccctggacctatcacctgtcctccacctatgagcgtggaacacgccgacatctgggtcaagagctacagcctgtacagcagagagcggtacatctgcaacagcggcttcaagagaaaggccggcacaagcagcctgaccgagtgtgtgctgaacaaggccacaaacgtggcccactggaccacacctagcctgaagtgcatcagagatcccgctctggttcatcagaggcctgcccctccatctacagtgacaacagctggcgtgacccctcagcctgagtctctgtctccatctggaaaagagcctgccgccagctctcccagctctaacaatactgctgccaccacagccgctatcgtgcctggatctcagctgatgcctagcaagagccctagcaccggcacaacagagatcagctctcacgagagcagccacggaacaccttctcagaccaccgccaagaattgggagctgacagcctctgcctctcatcagccacctggcgtgtacccacagggccactctgatacaacagtggccatcagcaccagcaccgttctgctgtgtggcctgtctgctgttagcctgctggcctgctacctgaagtctagacagacacctcctctggccagcgtggaaatggaagccatggaagctctgcctgtcacatggggcaccagcagcagagatgaggacctcgagaattgcagccaccacctgtaagcggccgcgtcgagtctagagggcccgtttaaacccgctgatcagcctcgactgtgccttctagttgccagccatctgttgtttgcccctcccccgtgccttccttgaccctggaaggtgccactcccactgtcctttcctaataaaatgaggaaattgcatcgcattgtctgagtaggtgtcattctattctggggggtggggtggggcaggacagcaagggggaggattgggaagacaatagcaggcatgctggggatgcggtgggctctatggatttggctacagcaacagggtggtggacctcatggcccacatggcctccaaggagtaagacccctggaccaccagccccagcaagagcacaagaggaagagagagaccctcactgctggggagtccctgccacactcagtcccccaccacactgaatctcccctcctcacagttgccatgtagaccccttgaagaggggaggggcctagggagccgcaccttgtcatgtaccatcaataaagtaccctgtgctcaaccagttacttgtcctgtcttattctagggtctggggcagaggggagggaagctgggcttgtgtcaaggtgagacattcttgctggggagggacctggtatgttctcctcagactgagggtagggcctccaaacagccttgcttgcttcgagaaccatttgcttcccgctcagacgtcttgagtgctacaggaagctggcaccactacttcagagaacaaggccttttcctctcctcgctccagt

SEQ ID NO: 210 - DNA, 3413 bp, Artificial Sequence
  Description of Artificial Sequence: Synthetic polynucleotide
gaagactgtggatggcccctccgggaaactgtggcgtgatggccgcggggctctccagaacatcatccctgcctctactggcgctgccaaggctgtgggcaaggtcatccctgagctgaacgggaagctcactggcatggccttccgtgtccccactgccaacgtgtcagtggtggacctgacctgccgtctagaaaaacctgccaaatatgatgacatcaagaaggtggtgaagcaggcgtcggagggccccctcaagggcatcctgggctacactgagcaccaggtggtctcctctgacttcaacagcgacacccactcctccacctttgacgctggggctggcattgccctcaacgaccactttgtcaagctcatttcctggtatgtggctggggccagagactggctcttaaaaagtgcagggtctggcgccctctggtggctggctcagaaaaagggccctgacaactctttacatcttctaggtatgacaacgagttcggatatagcaatagagtggtcgatctgatggctcatatggctagcaaagagggaagcggagctactaacttcagcctgctgaagcaggctggagacgtggaggagaaccctggacctatggattggacctggatcctgtttctggtggccgctgccacaagagtgcacagcaattgggtcaacgtgatcagcgacctgaagaagatcgaggacctgatccagagcatgcacatcgacgccacactgtacaccgagtccgatgtgcaccctagctgcaaagtgaccgccatgaagtgctttctgctggaactgcaagtgatcagcctggaaagcggcgacgccagcatccacgataccgtggaaaacctgatcatcctggccaacaacagcctgagcagcaacggcaatgtgaccgagagcggctgcaaagagtgcgaggaactggaagagaagaacatcaaagagttcctccagagcttcgtccacatcgtgcagatgttcatcaacaccagctctggcggaggaagcggaggcggaggatctggtggtggtggatctggcggcggtggtagtggcggaggttctctgcaaatcacctgtcctccacctatgagcgtggaacacgccgacatctgggtcaagagctacagcctgtacagcagagagcggtacatctgcaacagcggcttcaagagaaaggccggcacaagcagcctgaccgagtgtgtgctgaacaaggccacaaacgtggcccactggaccacacctagcctgaagtgcatcagagatcccgctctggttcatcagaggcctgcccctccatctacagtgacaacagctggcgtgacccctcagcctgagtctctgtctccatctggaaaagagcctgccgccagctctcccagctctaacaatactgctgccaccacagccgctatcgtgcctggatctcagctgatgcctagcaagagccctagcaccggcacaacagagatcagctctcacgagagcagccacggaacaccttctcagaccaccgccaagaattgggagctgacagcctctgcctctcatcagccacctggcgtgtacccacagggccactctgatacaacagtggccatcagcaccagcaccgttctgctgtgtggcctgtctgctgttagcctgctggcctgctacctgaagtctagacagacacctcctctggccagcgtggaaatggaagccatggaagctctgcctgtcacatggggcaccagcagcagagatgaggacctcgagaattgcagccaccacctgggaagcggagccacaaacttctctctgctgaagcaggcaggagatgttgaagaaaaccctggacctatgtggcagctgttgctgccgacagccctcctgttgctggtctccgctggcatgagaaccgaggatctgcctaaggccgtggtgttcctggaacctcagtggtacagagtgctggaaaaggacagcgtgaccctgaagtgccagggcgcctattctcccgaggacaatagcacccagtggttccacaacgagagcctgatcagcagccaggccagcagctactttatcgatgccgccaccgtggacgacagcggcgagtacagatgccagaccaatctgagcaccctgagcgaccctgtgcagctggaagtgcacattggatggttgctgctgcaagcccctagatgggtgttcaaagaagaggaccccatccacctgagatgccactcttggaagaacacagccctgcacaaagtgacctacctgcagaacggcaagggcagaaagtacttccaccacaacagcgacttctacatccccaaggccacactgaaggactccggctcctacttctgcagaggcctggtcggcagcaagaacgtgtccagcgagacagtgaacatcaccatcacacagggcctcgccgtgtctaccatcagcagctttttcccacctggctatcaggtgtccttctgcctggtcatggtgctgctgttcgccgtggataccggcctgtacttcagcgtcaagaccaacatccggtccagcaccagagactggaaggaccacaagttcaagtggcggaaggaccctcaggacaagtaagcggccgcgtcgagtctagagggcccgtttaaacccgctgatcagcctcgactgtgccttctagttgccagccatctgttgtttgcccctcccccgtgccttccttgaccctggaaggtgccactcccactgtcctttcctaataaaatgaggaaattgcatcgcattgtctgagtaggtgtcattctattctggggggtggggtggggcaggacagcaagggggaggattgggaagacaatagcaggcatgctggggatgcggtgggctctatggatttggctacagcaacagggtggtggacctcatggcccacatggcctccaaggagtaagacccctggaccaccagccccagcaagagcacaagaggaagagagagaccctcactgctggggagtccctgccacactcagtcccccaccacactgaatctcccctcctcacagttgccatgtagaccccttgaagaggggaggggcctagggagccgcaccttgtcatgtaccatcaataaagtaccctgtgctcaaccagttacttgtcctgtcttattctagggtctggggcagaggggagggaagctgggcttgtgtcaaggtgagacattcttgctggggagggacctggtatgttctcctcagactgagggtagggcctccaaacagccttgcttgcttcgagaaccatttgcttcccgctcagacgtcttgagtgctacaggaagctggcaccactacttcagagaacaaggccttttcctctcctcgctccagt

SEQ ID NO: 211 - DNA, 3401 bp, Artificial Sequence
  Description of Artificial Sequence: Synthetic polynucleotide
gaagactgtggatggcccctccgggaaactgtggcgtgatggccgcggggctctccagaacatcatccctgcctctactggcgctgccaaggctgtgggcaaggtcatccctgagctgaacgggaagctcactggcatggccttccgtgtccccactgccaacgtgtcagtggtggacctgacctgccgtctagaaaaacctgccaaatatgatgacatcaagaaggtggtgaagcaggcgtcggagggccccctcaagggcatcctgggctacactgagcaccaggtggtctcctctgacttcaacagcgacacccactcctccacctttgacgctggggctggcattgccctcaacgaccactttgtcaagctcatttcctggtatgtggctggggccagagactggctcttaaaaagtgcagggtctggcgccctctggtggctggctcagaaaaagggccctgacaactctttacatcttctaggtatgacaacgagttcggatatagcaatagagtggtcgatctgatggctcatatggctagcaaagagggaagcggagctactaacttcagcctgctgaagcaggctggagacgtggaggagaaccctggacctatggattggacctggatcctgtttctggtggccgctgccacaagagtgcacagcaattgggtcaacgtgatcagcgacctgaagaagatcgaggacctgatccagagcatgcacatcgacgccacactgtacaccgagtccgatgtgcaccctagctgcaaagtgaccgccatgaagtgctttctgctggaactgcaagtgatcagcctggaaagcggcgacgccagcatccacgataccgtggaaaacctgatcatcctggccaacaacagcctgagcagcaacggcaatgtgaccgagagcggctgcaaagagtgcgaggaactggaagagaagaacatcaaagagttcctccagagcttcgtccacatcgtgcagatgttcatcaacaccagcggaagcggagccacaaacttctctctgctgaagcaggcaggagatgttgaagaaaaccctggacctatcacctgtcctccacctatgagcgtggaacacgccgacatctgggtcaagagctacagcctgtacagcagagagcggtacatctgcaacagcggcttcaagagaaaggccggcacaagcagcctgaccgagtgtgtgctgaacaaggccacaaacgtggcccactggaccacacctagcctgaagtgcatcagagatcccgctctggttcatcagaggcctgcccctccatctacagtgacaacagctggcgtgacccctcagcctgagtctctgtctccatctggaaaagagcctgccgccagctctcccagctctaacaatactgctgccaccacagccgctatcgtgcctggatctcagctgatgcctagcaagagccctagcaccggcacaacagagatcagctctcacgagagcagccacggaacaccttctcagaccaccgccaagaattgggagctgacagcctctgcctctcatcagccacctggcgtgtacccacagggccactctgatacaacagtggccatcagcaccagcaccgttctgctgtgtggcctgtctgctgttagcctgctggcctgctacctgaagtctagacagacacctcctctggccagcgtggaaatggaagccatggaagctctgcctgtcacatggggcaccagcagcagagatgaggacctcgagaattgcagccaccacctgggaagcggagccacaaacttctctctgctgaagcaggcaggagatgttgaagaaaaccctggacctatgtggcagctgttgctgccgacagccctcctgttgctggtctccgctggcatgagaaccgaggatctgcctaaggccgtggtgttcctggaacctcagtggtacagagtgctggaaaaggacagcgtgaccctgaagtgccagggcgcctattctcccgaggacaatagcacccagtggttccacaacgagagcctgatcagcagccaggccagcagctactttatcgatgccgccaccgtggacgacagcggcgagtacagatgccagaccaatctgagcaccctgagcgaccctgtgcagctggaagtgcacattggatggttgctgctgcaagcccctagatgggtgttcaaagaagaggaccccatccacctgagatgccactcttggaagaacacagccctgcacaaagtgacctacctgcagaacggcaagggcagaaagtacttccaccacaacagcgacttctacatccccaaggccacactgaaggactccggctcctacttctgcagaggcctggtcggcagcaagaacgtgtccagcgagacagtgaacatcaccatcacacagggcctcgccgtgtctaccatcagcagctttttcccacctggctatcaggtgtccttctgcctggtcatggtgctgctgttcgccgtggataccggcctgtacttcagcgtcaagaccaacatccggtccagcaccagagactggaaggaccacaagttcaagtggcggaaggaccctcaggacaagtaagcggccgcgtcgagtctagagggcccgtttaaacccgctgatcagcctcgactgtgccttctagttgccagccatctgttgtttgcccctcccccgtgccttccttgaccctggaaggtgccactcccactgtcctttcctaataaaatgaggaaattgcatcgcattgtctgagtaggtgtcattctattctggggggtggggtggggcaggacagcaagggggaggattgggaagacaatagcaggcatgctggggatgcggtgggctctatggatttggctacagcaacagggtggtggacctcatggcccacatggcctccaaggagtaagacccctggaccaccagccccagcaagagcacaagaggaagagagagaccctcactgctggggagtccctgccacactcagtcccccaccacactgaatctcccctcctcacagttgccatgtagaccccttgaagaggggaggggcctagggagccgcaccttgtcatgtaccatcaataaagtaccctgtgctcaaccagttacttgtcctgtcttattctagggtctggggcagaggggagggaagctgggcttgtgtcaaggtgagacattcttgctggggagggacctggtatgttctcctcagactgagggtagggcctccaaacagccttgcttgcttcgagaaccatttgcttcccgctcagacgtcttgagtgctacaggaagctggcaccactacttcagagaacaaggccttttcctctcctcgctccagt

SEQ ID NO: 212 - DNA, 3413 bp, Artificial Sequence
  Description of Artificial Sequence: Synthetic polynucleotide
gaagactgtggatggcccctccgggaaactgtggcgtgatggccgcggggctctccagaacatcatccctgcctctactggcgctgccaaggctgtgggcaaggtcatccctgagctgaacgggaagctcactggcatggccttccgtgtccccactgccaacgtgtcagtggtggacctgacctgccgtctagaaaaacctgccaaatatgatgacatcaagaaggtggtgaagcaggcgtcggagggccccctcaagggcatcctgggctacactgagcaccaggtggtctcctctgacttcaacagcgacacccactcctccacctttgacgctggggctggcattgccctcaacgaccactttgtcaagctcatttcctggtatgtggctggggccagagactggctcttaaaaagtgcagggtctggcgccctctggtggctggctcagaaaaagggccctgacaactctttacatcttctaggtatgacaacgagttcggatatagcaatagagtggtcgatctgatggctcatatggctagcaaagagggaagcggagctactaacttcagcctgctgaagcaggctggagacgtggaggagaaccctggacctatgtggcagctgttgctgccgacagccctcctgttgctggtctccgctggcatgagaaccgaggatctgcctaaggccgtggtgttcctggaacctcagtggtacagagtgctggaaaaggacagcgtgaccctgaagtgccagggcgcctattctcccgaggacaatagcacccagtggttccacaacgagagcctgatcagcagccaggccagcagctactttatcgatgccgccaccgtggacgacagcggcgagtacagatgccagaccaatctgagcaccctgagcgaccctgtgcagctggaagtgcacattggatggttgctgctgcaagcccctagatgggtgttcaaagaagaggaccccatccacctgagatgccactcttggaagaacacagccctgcacaaagtgacctacctgcagaacggcaagggcagaaagtacttccaccacaacagcgacttctacatccccaaggccacactgaaggactccggctcctacttctgcagaggcctggtcggcagcaagaacgtgtccagcgagacagtgaacatcaccatcacacagggcctcgccgtgtctaccatcagcagctttttcccacctggctatcaggtgtccttctgcctggtcatggtgctgctgttcgccgtggataccggcctgtacttcagcgtcaagaccaacatccggtccagcaccagagactggaaggaccacaagttcaagtggcggaaggaccctcaggacaagggaagcggagccacaaacttctctctgctgaagcaggcaggagatgttgaagaaaaccctggacctatggattggacctggatcctgtttctggtggccgctgccacaagagtgcacagcaattgggtcaacgtgatcagcgacctgaagaagatcgaggacctgatccagagcatgcacatcgacgccacactgtacaccgagtccgatgtgcaccctagctgcaaagtgaccgccatgaagtgctttctgctggaactgcaagtgatcagcctggaaagcggcgacgccagcatccacgataccgtggaaaacctgatcatcctggccaacaacagcctgagcagcaacggcaatgtgaccgagagcggctgcaaagagtgcgaggaactggaagagaagaacatcaaagagttcctccagagcttcgtccacatcgtgcagatgttcatcaacaccagctctggcggaggaagcggaggcggaggatctggtggtggtggatctggcggcggtggtagtggcggaggttctctgcaaatcacctgtcctccacctatgagcgtggaacacgccgacatctgggtcaagagctacagcctgtacagcagagagcggtacatctgcaacagcggcttcaagagaaaggccggcacaagcagcctgaccgagtgtgtgctgaacaaggccacaaacgtggcccactggaccacacctagcctgaagtgcatcagagatcccgctctggttcatcagaggcctgcccctccatctacagtgacaacagctggcgtgacccctcagcctgagtctctgtctccatctggaaaagagcctgccgccagctctcccagctctaacaatactgctgccaccacagccgctatcgtgcctggatctcagctgatgcctagcaagagccctagcaccggcacaacagagatcagctctcacgagagcagccacggaacaccttctcagaccaccgccaagaattgggagctgacagcctctgcctctcatcagccacctggcgtgtacccacagggccactctgatacaacagtggccatcagcaccagcaccgttctgctgtgtggcctgtctgctgttagcctgctggcctgctacctgaagtctagacagacacctcctctggccagcgtggaaatggaagccatggaagctctgcctgtcacatggggcaccagcagcagagatgaggacctcgagaattgcagccaccacctgtaagcggccgcgtcgagtctagagggcccgtttaaacccgctgatcagcctcgactgtgccttctagttgccagccatctgttgtttgcccctcccccgtgccttccttgaccctggaaggtgccactcccactgtcctttcctaataaaatgaggaaattgcatcgcattgtctgagtaggtgtcattctattctggggggtggggtggggcaggacagcaagggggaggattgggaagacaatagcaggcatgctggggatgcggtgggctctatggatttggctacagcaacagggtggtggacctcatggcccacatggcctccaaggagtaagacccctggaccaccagccccagcaagagcacaagaggaagagagagaccctcactgctggggagtccctgccacactcagtcccccaccacactgaatctcccctcctcacagttgccatgtagaccccttgaagaggggaggggcctagggagccgcaccttgtcatgtaccatcaataaagtaccctgtgctcaaccagttacttgtcctgtcttattctagggtctggggcagaggggagggaagctgggcttgtgtcaaggtgagacattcttgctggggagggacctggtatgttctcctcagactgagggtagggcctccaaacagccttgcttgcttcgagaaccatttgcttcccgctcagacgtcttgagtgctacaggaagctggcaccactacttcagagaacaaggccttttcctctcctcgctccagt

SEQ ID NO: 213 - DNA, 3413 bp, Artificial Sequence; identical to SEQ ID NO: 212
  Description of Artificial Sequence: Synthetic polynucleotide

SEQ ID NO: 214 - DNA, 2174 bp, Artificial Sequence
  Description of Artificial Sequence: Synthetic polynucleotide
gaagactgtggatggcccctccgggaaactgtggcgtgatggccgcggggctctccagaacatcatccctgcctctactggcgctgccaaggctgtgggcaaggtcatccctgagctgaacgggaagctcactggcatggccttccgtgtccccactgccaacgtgtcagtggtggacctgacctgccgtctagaaaaacctgccaaatatgatgacatcaagaaggtggtgaagcaggcgtcggagggccccctcaagggcatcctgggctacactgagcaccaggtggtctcctctgacttcaacagcgacacccactcctccacctttgacgctggggctggcattgccctcaacgaccactttgtcaagctcatttcctggtatgtggctggggccagagactggctcttaaaaagtgcagggtctggcgccctctggtggctggctcagaaaaagggccctgacaactctttacatcttctaggtatgacaacgagttcggatatagcaatagagtggtcgatctgatggctcatatggctagcaaagagggaagcggagctactaacttcagcctgctgaagcaggctggagacgtggaggagaaccctggacctatgtcaaatattacagatccacagatgtgggattttgatgatctaaatttcactggcatgccacctgcagatgaagattacagcccctgtatgctagaaactgagacactcaacaagtatgttgtgatcatcgcctatgccctagtgttcctgctgagcctgctgggaaactccctggtgatgctggtcatcttatacagcagggtcggccgctccgtcactgatgtctacctgctgaacctggccttggccgacctactctttgccctgaccttgcccatctgggccgcctccaaggtgaatggctggatttttggcacattcctgtgcaaggtggtctcactcctgaaggaagtcaacttctacagtggcatcctgctgttggcctgcatcagtgtggaccgttacctggccattgtccatgccacacgcacactgacccagaagcgtcacttggtcaagtttgtttgtcttggctgctggggactgtctatgaatctgtccctgcccttcttccttttccgccaggcttaccatccaaacaattccagtccagtttgctatgaggtcctgggaaatgacacagcaaaatggcggatggtgttgcggatcctgcctcacacctttggcttcatcgtgccgctgtttgtcatgctgttctgctatggattcaccctgcgtacactgtttaaggcccacatggggcagaagcaccgagccatgagggtcatctttgctgtcgtcctcatcttcctgctttgctggctgccctacaacctggtcctgctggcagacaccctcatgaggacccaggtgatccaggagagctgtgagcgccgcaacaacatcggccgggccctggatgccactgagattctgggatttctccatagctgcctcaaccccatcatctacgccttcatcggccaaaattttcgccatggattcctcaagatcctggctatgcatggcctggtcagcaaggagttcttggcacgtcatcgtgttacctcctacacttcttcgtctgtcaatgtctcttccaacctctgaatttggctacagcaacagggtggtggacctcatggcccacatggcctccaaggagtaagacccctggaccaccagccccagcaagagcacaagaggaagagagagaccctcactgctggggagtccctgccacactcagtcccccaccacactgaatctcccctcctcacagttgccatgtagaccccttgaagaggggaggggcctagggagccgcaccttgtcatgtaccatcaataaagtaccctgtgctcaaccagttacttgtcctgtcttattctagggtctggggcagaggggagggaagctgggcttgtgtcaaggtgagacattcttgctggggagggacctggtatgttctcctcagactgagggtagggcctccaaacagccttgcttgcttcgagaaccatttgcttcccgctcagacgtcttgagtgctacaggaagctggcaccactacttcagagaacaaggccttttcctctcctcgctccagt

SEQ ID NO: 215 - DNA, 2369 bp, Artificial Sequence
  Description of Artificial Sequence: Synthetic polynucleotide
gaagactgtggatggcccctccgggaaactgtggcgtgatggccgcggggctctccagaacatcatccctgcctctactggcgctgccaaggctgtgggcaaggtcatccctgagctgaacgggaagctcactggcatggccttccgtgtccccactgccaacgtgtcagtggtggacctgacctgccgtctagaaaaacctgccaaatatgatgacatcaagaaggtggtgaagcaggcgtcggagggccccctcaagggcatcctgggctacactgagcaccaggtggtctcctctgacttcaacagcgacacccactcctccacctttgacgctggggctggcattgccctcaacgaccactttgtcaagctcatttcctggtatgtggctggggccagagactggctcttaaaaagtgcagggtctggcgccctctggtggctggctcagaaaaagggccctgacaactctttacatcttctaggtatgacaacgagttcggatatagcaatagagtggtcgatctgatggctcatatggctagcaaagagggaagcggagctactaacttcagcctgctgaagcaggctggagacgtggaggagaaccctggacctatggagttgaggaagtacggccctggaagactggcggggacagttataggaggagctgctcagagtaaatcacagactaaatcagactcaatcacaaaagagttcctgccaggcctttacacagccccttcctccccgttcccgccctcacaggtgagtgaccaccaagtgctaaatgacgccgaggttgccgccctcctggagaacttcagctcttcctatgactatggagaaaacgagagtgactcgtgctgtacctccccgccctgcccacaggacttcagcctgaacttcgaccgggccttcctgccagccctctacagcctcctctttctgctggggctgctgggcaacggcgcggtggcagccgtgctgctgagccggcggacagccctgagcagcaccgacaccttcctgctccacctagctgtagcagacacgctgctggtgctgacactgccgctctgggcagtggacgctgccgtccagtgggtctttggctctggcctctgcaaagtggcaggtgccctcttcaacatcaacttctacgcaggagccctcctgctggcctgcatcagctttgaccgctacctgaacatagttcatgccacccagctctaccgccgggggcccccggcccgcgtgaccctcacctgcctggctgtctgggggctctgcctgcttttcgccctcccagacttcatcttcctgtcggcccaccacgacgagcgcctcaacgccacccactgccaatacaacttcccacaggtgggccgcacggctctgcgggtgctgcagctggtggctggctttctgctgcccctgctggtcatggcctactgctatgcccacatcctggccgtgctgctggtttccaggggccagcggcgcctgcgggccatgcggctggtggtggtggtcgtggtggcctttgccctctgctggaccccctatcacctggtggtgctggtggacatcctcatggacctgggcgctttggcccgcaactgtggccgagaaagcagggtagacgtggccaagtcggtcacctcaggcctgggctacatgcactgctgcctcaacccgctgctctatgcctttgtaggggtcaagttccgggagcggatgtggatgctgctcttgcgcctgggctgccccaaccagagagggctccagaggcagccatcgtcttcccgccgggattcatcctggtctgagacctcagaggcctcctactcgggcttgtgaatttggctacagcaacagggtggtggacctcatggcccacatggcctccaaggagtaagacccctggaccaccagccccagcaagagcacaagaggaagagagagaccctcactgctggggagtccctgccacactcagtcccccaccacactgaatctcccctcctcacagttgccatgtagaccccttgaagaggggaggggcctagggagccgcaccttgtcatgtaccatcaataaagtaccctgtgctcaaccagttacttgtcctgtcttattctagggtctggggcagaggggagggaagctgggcttgtgtcaaggtgagacattcttgctggggagggacctggtatgttctcctcagactgagggtagggcctccaaacagccttgcttgcttcgagaaccatttgcttcccgctcagacgtcttgagtgctacaggaagctggcaccactacttcagagaacaaggccttttcctctcctcgctccagt

SEQ ID NO: 216 - DNA, 2228 bp, Artificial Sequence
  Description of Artificial Sequence: Synthetic polynucleotide
gaagactgtggatggcccctccgggaaactgtggcgtgatggccgcggggctctccagaacatcatccctgcctctactggcgctgccaaggctgtgggcaaggtcatccctgagctgaacgggaagctcactggcatggccttccgtgtccccactgccaacgtgtcagtggtggacctgacctgccgtctagaaaaacctgccaaatatgatgacatcaagaaggtggtgaagcaggcgtcggagggccccctcaagggcatcctgggctacactgagcaccaggtggtctcctctgacttcaacagcgacacccactcctccacctttgacgctggggctggcattgccctcaacgaccactttgtcaagctcatttcctggtatgtggctggggccagagactggctcttaaaaagtgcagggtctggcgccctctggtggctggctcagaaaaagggccctgacaactctttacatcttctaggtatgacaacgagttcggatatagcaatagagtggtcgatctgatggctcatatggctagcaaagagggaagcggagctactaacttcagcctgctgaagcaggctggagacgtggaggagaaccctggacctatggtccttgaggtgagtgaccaccaagtgctaaatgacgccgaggttgccgccctcctggagaacttcagctcttcctatgactatggagaaaacgagagtgactcgtgctgtacctccccgccctgcccacaggacttcagcctgaacttcgaccgggccttcctgccagccctctacagcctcctctttctgctggggctgctgggcaacggcgcggtggcagccgtgctgctgagccggcggacagccctgagcagcaccgacaccttcctgctccacctagctgtagcagacacgctgctggtgctgacactgccgctctgggcagtggacgctgccgtccagtgggtctttggctctggcctctgcaaagtggcaggtgccctcttcaacatcaacttctacgcaggagccctcctgctggcctgcatcagctttgaccgctacctgaacatagttcatgccacccagctctaccgccgggggcccccggcccgcgtgaccctcacctgcctggctgtctgggggctctgcctgcttttcgccctcccagacttcatcttcctgtcggcccaccacgacgagcgcctcaacgccacccactgccaatacaacttcccacaggtgggccgcacggctctgcgggtgctgcagctggtggctggctttctgctgcccctgctggtcatggcctactgctatgcccacatcctggccgtgctgctggtttccaggggccagcggcgcctgcgggccatgcggctggtggtggtggtcgtggtggcctttgccctctgctggaccccctatcacctggtggtgctggtggacatcctcatggacctgggcgctttggcccgcaactgtggccgagaaagcagggtagacgtggccaagtcggtcacctcaggcctgggctacatgcactgctgcctcaacccgctgctctatgcctttgtaggggtcaagttccgggagcggatgtggatgctgctcttgcgcctgggctgccccaaccagagagggctccagaggcagccatcgtcttcccgccgggattcatcctggtctgagacctcagaggcctcctactcgggcttgtgaatttggctacagcaacagggtggtggacctcatggcccacatggcctccaaggagtaagacccctggaccaccagccccagcaagagcacaagaggaagagagagaccctcactgctggggagtccctgccacactcagtcccccaccacactgaatctcccctcctcacagttgccatgtagaccccttgaagaggggaggggcctagggagccgcaccttgtcatgtaccatcaataaagtaccctgtgctcaaccagttacttgtcctgtcttattctagggtctggggcagaggggagggaagctgggcttgtgtcaaggtgagacattcttgctggggagggacctggtatgttctcctcagactgagggtagggcctccaaacagccttgcttgcttcgagaaccatttgcttcccgctcagacgtcttgagtgctacaggaagctggcaccactacttcagagaacaaggccttttcctctcctcgctccagt

SEQ ID NO: 217 - DNA, 2180 bp, Artificial Sequence
  Description of Artificial Sequence: Synthetic polynucleotide
gaagactgtggatggcccctccgggaaactgtggcgtgatggccgcggggctctccagaacatcatccctgcctctactggcgctgccaaggctgtgggcaaggtcatccctgagctgaacgggaagctcactggcatggccttccgtgtccccactgccaacgtgtcagtggtggacctgacctgccgtctagaaaaacctgccaaatatgatgacatcaagaaggtggtgaagcaggcgtcggagggccccctcaagggcatcctgggctacactgagcaccaggtggtctcctctgacttcaacagcgacacccactcctccacctttgacgctggggctggcattgccctcaacgaccactttgtcaagctcatttcctggtatgtggctggggccagagactggctcttaaaaagtgcagggtctggcgccctctggtggctggctcagaaaaagggccctgacaactctttacatcttctaggtatgacaacgagttcggatatagcaatagagtggtcgatctgatggctcatatggctagcaaagagggaagcggagctactaacttcagcctgctgaagcaggctggagacgtggaggagaaccctggacctatggattatcaagtgtcaagtccaatctatgacatcaattattatacatcggagccctgccaaaaaatcaatgtgaagcaaatcgcagcccgcctcctgcctccgctctactcactggtgttcatctttggttttgtgggcaacatgctggtcatcctcatcctgataaactgcaaaaggctgaagagcatgactgacatctacctgctcaacctggccatctctgacctgtttttccttcttactgtccccttctgggctcactatgctgccgcccagtgggactttggaaatacaatgtgtcaactcttgacagggctctattttataggcttcttctctggaatcttcttcatcatcctcctgacaatcgataggtacctggctgtcgtccatgctgtgtttgctttaaaagccaggacggtcacctttggggtggtgacaagtgtgatcacttgggtggtggctgtgtttgcgtctctcccaggaatcatctttaccagatctcaaaaagaaggtcttcattacacctgcagctctcattttccatacagtcagtatcaattctggaagaatttccagacattaaagatagtcatcttggggctggtcctgccgctgcttgtcatggtcatctgctactcgggaatcctaaaaactctgcttcggtgtcgaaatgagaagaagaggcacagggctgtgaggcttatcttcaccatcatgattgtttattttctcttctgggctccctacaacattgtccttctcctgaacaccttccaggaattctttggcctgaataattgcagtagctctaacaggttggaccaagctatgcaggtgacagagactcttgggatgacgcactgctgcatcaaccccatcatctatgcctttgtcggggagaagttcagaaactacctcttagtcttcttccaaaagcacattgccaaacgcttctgcaaatgctgttctattttccagcaagaggctcccgagcgagcaagctcagtttacacccgatccactggggagcaggaaatatctgtgggcttgtgaatttggctacagcaacagggtggtggacctcatggcccacatggcctccaaggagtaagacccctggaccaccagccccagcaagagcacaagaggaagagagagaccctcactgctggggagtccctgccacactcagtcccccaccacactgaatctcccctcctcacagttgccatgtagaccccttgaagaggggaggggcctagggagccgcaccttgtcatgtaccatcaataaagtaccctgtgctcaaccagttacttgtcctgtcttattctagggtctggggcagaggggagggaagctgggcttgtgtcaaggtgagacattcttgctggggagggacctggtatgttctcctcagactgagggtagggcctccaaacagccttgcttgcttcgagaaccatttgcttcccgctcagacgtcttgagtgctacaggaagctggcaccactacttcagagaacaaggccttttcctctcctcgctccagt

SEQ ID NO: 218 - DNA, 2246 bp, Artificial Sequence
  Description of Artificial Sequence: Synthetic polynucleotide
gaagactgtggatggcccctccgggaaactgtggcgtgatggccgcggggctctccagaacatcatccctgcctctactggcgctgccaaggctgtgggcaaggtcatccctgagctgaacgggaagctcactggcatggccttccgtgtccccactgccaacgtgtcagtggtggacctgacctgccgtctagaaaaacctgccaaatatgatgacatcaagaaggtggtgaagcaggcgtcggagggccccctcaagggcatcctgggctacactgagcaccaggtggtctcctctgacttcaacagcgacacccactcctccacctttgacgctggggctggcattgccctcaacgaccactttgtcaagctcatttcctggtatgtggctggggccagagactggctcttaaaaagtgcagggtctggcgccctctggtggctggctcagaaaaagggccctgacaactctttacatcttctaggtatgacaacgagttcggatatagcaatagagtggtcgatctgatggctcatatggctagcaaagagggaagcggagctactaacttcagcctgctgaagcaggctggagacgtggaggagaaccctggacctatgctgtccacatctcgttctcggtttatcagaaataccaacgagagcggtgaagaagtcaccaccttttttgattatgattacggtgctccctgtcataaatttgacgtgaagcaaattggggcccaactcctgcctccgctctactcgctggtgttcatctttggttttgtgggcaacatgctggtcgtcctcatcttaataaactgcaaaaagctgaagtgcttgactgacatttacctgctcaacctggccatctctgatctgctttttcttattactctcccattgtgggctcactctgctgcaaatgagtgggtctttgggaatgcaatgtgcaaattattcacagggctgtatcacatcggttattttggcggaatcttcttcatcatcctcctgacaatcgatagatacctggctattgtccatgctgtgtttgctttaaaagccaggacggtcacctttggggtggtgacaagtgtgatcacctggttggtggctgtgtttgcttctgtcccaggaatcatctttactaaatgccagaaagaagattctgtttatgtctgtggcccttattttccacgaggatggaataatttccacacaataatgaggaacattttggggctggtcctgccgctgctcatcatggtcatctgctactcgggaatcctgaaaaccctgcttcggtgtcgaaacgagaagaagaggcatagggcagtgagagtcatcttcaccatcatgattgtttactttctcttctggactccctataatattgtcattctcctgaacaccttccaggaattcttcggcctgagtaactgtgaaagcaccagtcaactggaccaagccacgcaggtgacagagactcttgggatgactcactgctgcatcaatcccatcatctatgccttcgttggggagaagttcagaagcctttttcacatagctcttggctgtaggattgccccactccaaaaaccagtgtgtggaggtccaggagtgagaccaggaaagaatgtgaaagtgactacacaaggactcctcgatggtcgtggaaaaggaaagtcaattggcagagcccctgaagccagtcttcaggacaaagaaggagcctagatttggctacagcaacagggtggtggacctcatggcccacatggcctccaaggagtaagacccctggaccaccagccccagcaagagcacaagaggaagagagagaccctcactgctggggagtccctgccacactcagtcccccaccacactgaatctcccctcctcacagttgccatgtagaccccttgaagaggggaggggcctagggagccgcaccttgtcatgtaccatcaataaagtaccctgtgctcaaccagttacttgtcctgtcttattctagggtctggggcagaggggagggaagctgggcttgtgtcaaggtgagacattcttgctggggagggacctggtatgttctcctcagactgagggtagggcctccaaacagccttgcttgcttcgagaaccatttgcttcccgctcagacgtcttgagtgctacaggaagctggcaccactacttcagagaacaaggccttttcctctcctcgctccagt

SEQ ID NO: 219 - DNA, 24 bp, Artificial Sequence
  Description of Artificial Sequence: Synthetic oligonucleotide
catcgcattgtctgagtaggtgtc

SEQ ID NO: 220 - DNA, 22 bp, Artificial Sequence
  Description of Artificial Sequence: Synthetic oligonucleotide
tgcccacagaatagcttcttcc

SEQ ID NO: 221 - DNA, 20 bp, Artificial Sequence
  Description of Artificial Sequence: Synthetic oligonucleotide
tcccctcctcacagttgcca

SEQ ID NO: 222 - DNA, 22 bp, Artificial Sequence
  Description of Artificial Sequence: Synthetic oligonucleotide
ggagaaagtgtccaggcataag

SEQ ID NO: 223 - DNA, 22 bp, Artificial Sequence
  Description of Artificial Sequence: Synthetic oligonucleotide
ctccatcccactatgaccattc

SEQ ID NO: 224 - DNA, 22 bp, Artificial Sequence
  Description of Artificial Sequence: Synthetic oligonucleotide
agtttgtgtcaggatgggtggt

SEQ ID NO: 225 - DNA, 21 bp, Artificial Sequence
  Description of Artificial Sequence: Synthetic oligonucleotide
tgaggagcggaagacggagtt

SEQ ID NO: 226 - DNA, 21 bp, Artificial Sequence
  Description of Artificial Sequence: Synthetic oligonucleotide
ctttggagaagcagcatcttc

SEQ ID NO: 227 - DNA, 21 bp, Artificial Sequence
  Description of Artificial Sequence: Synthetic oligonucleotide
ctcccctaccatgactttatt

SEQ ID NO: 228 - DNA, 21 bp, Artificial Sequence
  Description of Artificial Sequence: Synthetic oligonucleotide
gacagagtagggtccagacgc

SEQ ID NO: 229 - DNA, 21 bp, Artificial Sequence
  Description of Artificial Sequence: Synthetic oligonucleotide
ctgaggagcggaagacggagt

SEQ ID NO: 230 - DNA, 21 bp, Artificial Sequence
  Description of Artificial Sequence: Synthetic oligonucleotide
gggcatcttgggcctcccaca

SEQ ID NO: 231 - DNA, 21 bp, Artificial Sequence
  Description of Artificial Sequence: Synthetic oligonucleotide
ccaagaggcatactcctcata

SEQ ID NO: 232 - DNA, 21 bp, Artificial Sequence
  Description of Artificial Sequence: Synthetic oligonucleotide
agaatgacgagaacataacac

SEQ ID NO: 233 - DNA, 21 bp, Artificial Sequence
  Description of Artificial Sequence: Synthetic oligonucleotide
cctgacgcggcatgtcatcag

SEQ ID NO: 234 - DNA, 21 bp, Artificial Sequence
  Description of Artificial Sequence: Synthetic oligonucleotide
agcgagcactgtgccatcatc

SEQ ID NO: 235 - DNA, 21 bp, Artificial Sequence
  Description of Artificial Sequence: Synthetic oligonucleotide
gcaggttaggtcgttcttcac

SEQ ID NO: 236 - DNA, 21 bp, Artificial Sequence
  Description of Artificial Sequence: Synthetic oligonucleotide
acctccatctgtgagaagcca

SEQ ID NO: 237 - DNA, 21 bp, Artificial Sequence
  Description of Artificial Sequence: Synthetic oligonucleotide
taaagtcatggtaggggagct

SEQ ID NO: 238 - DNA, 21 bp, Artificial Sequence
  Description of Artificial Sequence: Synthetic oligonucleotide
tcagagctacaggaacacatg

SEQ ID NO: 239 - DNA, 21 bp, Artificial Sequence
  Description of Artificial Sequence: Synthetic oligonucleotide
tctcagacatcaatctgaagc

SEQ ID NO: 240 - DNA, 21 bp, Artificial Sequence
  Description of Artificial Sequence: Synthetic oligonucleotide
catcagcctcctgccaccact

SEQ ID NO: 241 - DNA, 21 bp, Artificial Sequence
  Description of Artificial Sequence: Synthetic oligonucleotide
cgctcctcagccgtcaggaac

SEQ ID NO: 242 - DNA, 21 bp, Artificial Sequence
  Description of Artificial Sequence: Synthetic oligonucleotide
aacctgggaaaccggcaagac

SEQ ID NO: 243 - DNA, 21 bp, Artificial Sequence
  Description of Artificial Sequence: Synthetic oligonucleotide
tccacgccaagggcaacctac

SEQ ID NO: 244 - DNA, 21 bp, Artificial Sequence
  Description of Artificial Sequence: Synthetic oligonucleotide
gaggtgagcaatcccccgggc

SEQ ID NO: 245 - DNA, 21 bp, Artificial Sequence
  Description of Artificial Sequence: Synthetic oligonucleotide
cagcagaagctgagttcaacc

SEQ ID NO: 246 - DNA, 21 bp, Artificial Sequence
  Description of Artificial Sequence: Synthetic oligonucleotide
tccaagaggcatactcctcat

SEQ ID NO: 247 - DNA, 21 bp, Artificial Sequence
  Description of Artificial Sequence: Synthetic oligonucleotide
agcagaagctgagttcaacct

SEQ ID NO: 248 - DNA, 21 bp, Artificial Sequence
  Description of Artificial Sequence: Synthetic oligonucleotide
ccagttcctgacggctgagga

SEQ ID NO: 249 - DNA, 21 bp, Artificial Sequence
  Description of Artificial Sequence: Synthetic oligonucleotide
aggagtatgcctcttggaaga

SEQ ID NO: 250 - DNA, 21 bp, Artificial Sequence
  Description of Artificial Sequence: Synthetic oligonucleotide
ttccaagaggcatactcctca

SEQ ID NO: 251 - DNA, 21 bp, Artificial Sequence
  Description of Artificial Sequence: Synthetic oligonucleotide
caactgtgtaaattttgtgat

SEQ ID NO: 252 - DNA, 21 bp, Artificial Sequence
  Description of Artificial Sequence: Synthetic oligonucleotide
tgaaggaaaaaaaaaagcctg

SEQ ID NO: 253 - DNA, 21 bp, Artificial Sequence
  Description of Artificial Sequence: Synthetic oligonucleotide
cgtcttccgctcctcagccgt

SEQ ID NO: 254 - DNA, 21 bp, Artificial Sequence
  Description of Artificial Sequence: Synthetic oligonucleotide
ccaggtcatccacagacagag

SEQ ID NO: 255 - DNA, 21 bp, Artificial Sequence
  Description of Artificial Sequence: Synthetic oligonucleotide
gcctagagtgaagagattcat

SEQ ID NO: 256 - DNA, 21 bp, Artificial Sequence
  Description of Artificial Sequence: Synthetic oligonucleotide
gttctccaaagtgcattatga

SEQ ID NO: 257 - DNA, 21 bp, Artificial Sequence
  Description of Artificial Sequence: Synthetic oligonucleotide
gcatcttccagaataaagtca

SEQ ID NO: 258 - DNA, 20 bp, Artificial Sequence
  Description of Artificial Sequence: Synthetic oligonucleotide
caaccgtctggtggccgacg

SEQ ID NO: 259 - DNA, 20 bp, Artificial Sequence
  Description of Artificial Sequence: Synthetic oligonucleotide
caggatcggggctgtcgctt

SEQ ID NO: 260 - DNA, 20 bp, Artificial Sequence
  Description of Artificial Sequence: Synthetic oligonucleotide
tcgggcctcgctggccgtaa

SEQ ID NO: 261 - DNA, 20 bp, Artificial Sequence
  Description of Artificial Sequence: Synthetic oligonucleotide
gaggtagtcggccatgcgcc

SEQ ID NO: 262 - DNA, 20 bp, Artificial Sequence
  Description of Artificial Sequence: Synthetic oligonucleotide
caggtgttgtcgggcctcgc

SEQ ID NO: 263 - DNA, 20 bp, Artificial Sequence
  Description of Artificial Sequence: Synthetic oligonucleotide
ggaggtagtcggccatgcgc

SEQ ID NO: 264 - DNA, 20 bp, Artificial Sequence
  Description of Artificial Sequence: Synthetic oligonucleotide
ggcatactcaatgcgtacat

SEQ ID NO: 265 - DNA, 20 bp, Artificial Sequence
  Description of Artificial Sequence: Synthetic oligonucleotide
ccgccttgtcatcaaccgtc

SEQ ID NO: 266 - DNA, 20 bp, Artificial Sequence
  Description of Artificial Sequence: Synthetic oligonucleotide
aggatcggggctgtcgcttc

SEQ ID NO: 267 - DNA, 20 bp, Artificial Sequence
  Description of Artificial Sequence: Synthetic oligonucleotide
ccttgtcatcaaccgtctgg

SEQ ID NO: 268 - DNA, 20 bp, Artificial Sequence
  Description of Artificial Sequence: Synthetic oligonucleotide
tactcaatgcgtacattggt

SEQ ID NO: 269 - DNA, 20 bp, Artificial Sequence
  Description of Artificial Sequence: Synthetic oligonucleotide
gggttccattacggccagcg

SEQ ID NO: 270 - DNA, 20 bp, Artificial Sequence
  Description of Artificial Sequence: Synthetic oligonucleotide
ggcactgcttctgcgtacaa

SEQ ID NO: 271 - DNA, 20 bp, Artificial Sequence
  Description of Artificial Sequence: Synthetic oligonucleotide
ggttgatgacaaggcggcac

SEQ ID NO: 272 - DNA, 20 bp, Artificial Sequence
  Description of Artificial Sequence: Synthetic oligonucleotide
tgctggggccttcctcgagg

SEQ ID NO: 273 - DNA, 20 bp, Artificial Sequence
  Description of Artificial Sequence: Synthetic oligonucleotide
ttgctggctgtggagcggac

SEQ ID NO: 274 - DNA, 20 bp, Artificial Sequence
  Description of Artificial Sequence: Synthetic oligonucleotide
ttctcctaccttcgggaatc

SEQ ID NO: 275 - DNA, 20 bp, Artificial Sequence
  Description of Artificial Sequence: Synthetic oligonucleotide
gactggcttgggcagttcca

SEQ ID NO: 276 - DNA, 20 bp, Artificial Sequence
  Description of Artificial Sequence: Synthetic oligonucleotide
catgcagcccttgcctgctg

SEQ ID NO: 277 - DNA, 20 bp, Artificial Sequence
  Description of Artificial Sequence: Synthetic oligonucleotide
agcaaaggacgaggtctaga

SEQ ID NO: 278 - DNA, 20 bp, Artificial Sequence
  Description of Artificial Sequence: Synthetic oligonucleotide
gcctgctggggccttcctcg

SEQ ID NO: 279 - DNA, 20 bp, Artificial Sequence
  Description of Artificial Sequence: Synthetic oligonucleotide
cagactcaccagattcccga

SEQ ID NO: 280 - DNA, 20 bp, Artificial Sequence
  Description of Artificial Sequence: Synthetic oligonucleotide
acctcgtcctttgctggctg

SEQ ID NO: 281 - DNA, 20 bp, Artificial Sequence
  Description of Artificial Sequence: Synthetic oligonucleotide
ctcaccagattcccgaaggt

SEQ ID NO: 282 - DNA, 20 bp, Artificial Sequence
  Description of Artificial Sequence: Synthetic oligonucleotide
tacgcagaagcagtgcccgc

SEQ ID NO: 283 - DNA, 20 bp, Artificial Sequence
  Description of Artificial Sequence: Synthetic oligonucleotide
aggtgtacagcagtggctgg

SEQ ID NO: 284 - DNA, 20 bp, Artificial Sequence
  Description of Artificial Sequence: Synthetic oligonucleotide
ggtgtacagcagtggctggt

SEQ ID NO: 285 - DNA, 20 bp, Artificial Sequence
  Description of Artificial Sequence: Synthetic oligonucleotide
cggatgtggtcagccttgtg

SEQ ID NO: 286 - DNA, 20 bp, Artificial Sequence
  Description of Artificial Sequence: Synthetic oligonucleotide
cactgacagcgtgaacaggt

SEQ ID NO: 287 - DNA, 20 bp, Artificial Sequence
  Description of Artificial Sequence: Synthetic oligonucleotide
actgacagcgtgaacaggta

SEQ ID NO: 288 - DNA, 20 bp, Artificial Sequence
  Description of Artificial Sequence: Synthetic oligonucleotide
gctcactctctgtctgggct

SEQ ID NO: 289 - DNA, 20 bp, Artificial Sequence
  Description of Artificial Sequence: Synthetic oligonucleotide
ctggctgtggagcggactgg

SEQ ID NO: 290 - DNA, 20 bp, Artificial Sequence
  Description of Artificial Sequence: Synthetic oligonucleotide
gctctgactgtacggggcaa

SEQ ID NO: 291 - DNA, 20 bp, Artificial Sequence
  Description of Artificial Sequence: Synthetic oligonucleotide
agctctgactgtacggggca

SEQ ID NO: 292 - DNA, 20 bp, Artificial Sequence
  Description of Artificial Sequence: Synthetic oligonucleotide
acagtaccccttccagctct

SEQ ID NO: 293 - DNA, 20 bp, Artificial Sequence
  Description of Artificial Sequence: Synthetic oligonucleotide
cgtcggccaccagacggttg

SEQ ID NO: 294 - DNA, 20 bp, Artificial Sequence
  Description of Artificial Sequence: Synthetic oligonucleotide
ccagccactgctgtacacct

SEQ ID NO: 295 - DNA, 20 bp, Artificial Sequence
  Description of Artificial Sequence: Synthetic oligonucleotide
accccggccctgcctatgcc

SEQ ID NO: 296 - DNA, 20 bp, Artificial Sequence
  Description of Artificial Sequence: Synthetic oligonucleotide
ggtatcagcagtgcaggagg

SEQ ID NO: 297 - DNA, 20 bp, Artificial Sequence
  Description of Artificial Sequence: Synthetic oligonucleotide
gatgtggtcagccttgtgca

SEQ ID NO: 298 - DNA, 20 bp, Artificial Sequence
  Description of Artificial Sequence: Synthetic oligonucleotide
ggatgtggtcagccttgtgc

SEQ ID NO: 299 - DNA, 20 bp, Artificial Sequence
  Description of Artificial Sequence: Synthetic oligonucleotide
ggccacgcatcctggccttt

SEQ ID NO: 300 - DNA, 20 bp, Artificial Sequence
  Description of Artificial Sequence: Synthetic oligonucleotide
gaaaggccaggatgcgtggc

SEQ ID NO: 301 - DNA, 20 bp, Artificial Sequence
  Description of Artificial Sequence: Synthetic oligonucleotide
actgcttgtccaggccacgc

SEQ ID NO: 302 - DNA, 20 bp, Artificial Sequence
  Description of Artificial Sequence: Synthetic oligonucleotide
tctggactccaactgcttgt

SEQ ID NO: 303 - DNA, 20 bp, Artificial Sequence
  Description of Artificial Sequence: Synthetic oligonucleotide
gtctggactccaactgcttg

SEQ ID NO: 304 - DNA, 20 bp, Artificial Sequence
  Description of Artificial Sequence: Synthetic oligonucleotide
gcttccgtctggactccaac

SEQ ID NO: 305 - DNA, 20 bp, Artificial Sequence
  Description of Artificial Sequence: Synthetic oligonucleotide
gacggaagctggagtcggca

SEQ ID NO: 306 - DNA, 20 bp, Artificial Sequence
  Description of Artificial Sequence: Synthetic oligonucleotide
cgctgtcagtgaaaaccact

SEQ ID NO: 307 - DNA, 20 bp, Artificial Sequence
  Description of Artificial Sequence: Synthetic oligonucleotide
ctgacagcgtgaacaggtag

SEQ ID NO: 308 - DNA, 20 bp, Artificial Sequence
  Description of Artificial Sequence: Synthetic oligonucleotide
ttacggccagcgaggcccga

SEQ ID NO: 309 - DNA, 20 bp, Artificial Sequence
  Description of Artificial Sequence: Synthetic oligonucleotide
attacggccagcgaggcccg

SEQ ID NO: 310 - DNA, 20 bp, Artificial Sequence
  Description of Artificial Sequence: Synthetic oligonucleotide
ggaatctggtgagtctgagg

SEQ ID NO: 311 - DNA, 20 bp, Artificial Sequence
  Description of Artificial Sequence: Synthetic oligonucleotide
ccctcagactcaccagattc

SEQ ID NO: 312 - DNA, 20 bp, Artificial Sequence
  Description of Artificial Sequence: Synthetic oligonucleotide
cgaaggtaggagaaggtctt

SEQ ID NO: 313 - DNA, 20 bp, Artificial Sequence
  Description of Artificial Sequence: Synthetic oligonucleotide
gaaggtaggagaaggtcttg

SEQ ID NO: 314 - DNA, 20 bp, Artificial Sequence
  Description of Artificial Sequence: Synthetic oligonucleotide
gcacctttggctcactctct

SEQ ID NO: 315 - DNA, 20 bp, Artificial Sequence
  Description of Artificial Sequence: Synthetic oligonucleotide
tcgaggaggtggcagagggt

SEQ ID NO: 316 - DNA, 20 bp, Artificial Sequence
  Description of Artificial Sequence: Synthetic oligonucleotide
tggaactgcccaagccagtc

SEQ ID NO: 317 - DNA, 20 bp, Artificial Sequence
  Description of Artificial Sequence: Synthetic oligonucleotide
agggacggggcccacagggg

SEQ ID NO: 318 - DNA, 20 bp, Artificial Sequence
  Description of Artificial Sequence: Synthetic oligonucleotide
gggacggggcccacaggggc

SEQ ID NO: 319 - DNA, 20 bp, Artificial Sequence
  Description of Artificial Sequence: Synthetic oligonucleotide
ctccacagccagcaaaggac

SEQ ID NO: 320 - DNA, 20 bp, Artificial Sequence
  Description of Artificial Sequence: Synthetic oligonucleotide
cagccagcaaaggacgaggt

SEQ ID NO: 321 - DNA, 20 bp, Artificial Sequence
  Description of Artificial Sequence: Synthetic oligonucleotide
ctgccttctagacctcgtcc

SEQ ID NO: 322 - DNA, 20 bp, Artificial Sequence
  Description of Artificial Sequence: Synthetic oligonucleotide
cctaaggaggatgcgcctag

SEQ ID NO: 323 - DNA, 20 bp, Artificial Sequence
  Description of Artificial Sequence: Synthetic oligonucleotide
tggcctcctgcactgctgat

SEQ ID NO: 324 - DNA, 20 bp, Artificial Sequence
  Description of Artificial Sequence: Synthetic oligonucleotide
agcagtgcaggaggccacat

SEQ ID NO: 325 - DNA, 20 bp, Artificial Sequence
  Description of Artificial Sequence: Synthetic oligonucleotide
ccgactccagcttccgtctg

SEQ ID NO: 326 - DNA, 20 bp, Artificial Sequence
  Description of Artificial Sequence: Synthetic oligonucleotide
ggggttccattacggccagc

SEQ ID NO: 327 - DNA, 20 bp, Artificial Sequence
  Description of Artificial Sequence: Synthetic oligonucleotide
cacagcagatcctcctctgg

SEQ ID NO: 328 - DNA, 20 bp, Artificial Sequence
  Description of Artificial Sequence: Synthetic oligonucleotide
attgccccgtacagtcagag

SEQ ID NO: 329 - DNA, 20 bp, Artificial Sequence
  Description of Artificial Sequence: Synthetic oligonucleotide
cccgtacagtcagagctgga

SEQ ID NO: 330 - DNA, 20 bp, Artificial Sequence
  Description of Artificial Sequence: Synthetic oligonucleotide
tggtggaggagcaggcagtg

SEQ ID NO: 331 - DNA, 20 bp, Artificial Sequence
  Description of Artificial Sequence: Synthetic oligonucleotide
tccttaggcataggcagggc

SEQ ID NO: 332 - DNA, 20 bp, Artificial Sequence
  Description of Artificial Sequence: Synthetic oligonucleotide
cggccctgcctatgcctaag

SEQ ID NO: 333 - DNA, 20 bp, Artificial Sequence
  Description of Artificial Sequence: Synthetic oligonucleotide
taggcataggcagggccggg

SEQ ID NO: 334 - DNA, 20 bp, Artificial Sequence
  Description of Artificial Sequence: Synthetic oligonucleotide
aggcagggccggggtgggag

SEQ ID NO: 335 - DNA, 20 bp, Artificial Sequence
  Description of Artificial Sequence: Synthetic oligonucleotide
gcaggatcggggctgtcgct

SEQ ID NO: 336 - DNA, 20 bp, Artificial Sequence
  Description of Artificial Sequence: Synthetic oligonucleotide
ctgcacaaggctgaccacat

SEQ ID NO: 337 - DNA, 20 bp, Artificial Sequence
  Description of Artificial Sequence: Synthetic oligonucleotide
tgcacaaggctgaccacatc

SEQ ID NO: 338 - DNA, 20 bp, Artificial Sequence
  Description of Artificial Sequence: Synthetic oligonucleotide
ctgaccacatccggaaaggc

SEQ ID NO: 339 - DNA, 20 bp, Artificial Sequence
  Description of Artificial Sequence: Synthetic oligonucleotide
ggccacgcatcctggccttt

SEQ ID NO: 340 - DNA, 20 bp, Artificial Sequence
  Description of Artificial Sequence: Synthetic oligonucleotide
gcgtggcctggacaagcagt

SEQ ID NO: 341 - DNA, 20 bp, Artificial Sequence
  Description of Artificial Sequence: Synthetic oligonucleotide
gacaagcagttggagtccag

SEQ ID NO: 342 - DNA, 20 bp, Artificial Sequence
  Description of Artificial Sequence: Synthetic oligonucleotide
gttggagtccagacggaagc

SEQ ID NO: 343 - DNA, 20 bp, Artificial Sequence
  Description of Artificial Sequence: Synthetic oligonucleotide
atgcgtacattggtggggcc

SEQ ID NO: 344 - DNA, 20 bp, Artificial Sequence
  Description of Artificial Sequence: Synthetic oligonucleotide
tggccccaccaatgtacgca

SEQ ID NO: 345 - DNA, 20 bp, Artificial Sequence
  Description of Artificial Sequence: Synthetic oligonucleotide
gctacctgttcacgctgtca

SEQ ID NO: 346 - DNA, 20 bp, Artificial Sequence
  Description of Artificial Sequence: Synthetic oligonucleotide
tgacagcgtgaacaggtagc

SEQ ID NO: 347 - DNA, 20 bp, Artificial Sequence
  Description of Artificial Sequence: Synthetic oligonucleotide
gtcgggcctcgctggccgta

SEQ ID NO: 348 - DNA, 20 bp, Artificial Sequence
  Description of Artificial Sequence: Synthetic oligonucleotide
gcacttgcctaggctggtat

SEQ ID NO: 349 - DNA, 20 bp, Artificial Sequence
  Description of Artificial Sequence: Synthetic oligonucleotide
gggaatctggtgagtctgag

SEQ ID NO: 350 - DNA, 20 bp, Artificial Sequence
  Description of Artificial Sequence: Synthetic oligonucleotide
ctcaccagattcccgaaggt

SEQ ID NO: 351 - DNA, 20 bp, Artificial Sequence
  Description of Artificial Sequence: Synthetic oligonucleotide
ctcctaccttcgggaatctg

SEQ ID NO: 352 - DNA, 20 bp, Artificial Sequence
  Description of Artificial Sequence: Synthetic oligonucleotide
caagaccttctcctaccttc

SEQ ID NO: 353 - DNA, 20 bp, Artificial Sequence
  Description of Artificial Sequence: Synthetic oligonucleotide
ccaagaccttctcctacctt

SEQ ID NO: 354 - DNA, 20 bp, Artificial Sequence
  Description of Artificial Sequence: Synthetic oligonucleotide
gccaagaccttctcctacct

SEQ ID NO: 355 - DNA, 20 bp, Artificial Sequence
  Description of Artificial Sequence: Synthetic oligonucleotide
tatgcacagcagatcctcct

SEQ ID NO: 356 - DNA, 20 bp, Artificial Sequence
  Description of Artificial Sequence: Synthetic oligonucleotide
caaaggtgctggacccagag

SEQ ID NO: 357 - DNA, 20 bp, Artificial Sequence
  Description of Artificial Sequence: Synthetic oligonucleotide
ggctcactctctgtctgggc

SEQ ID NO: 358 - DNA, 20 bp, Artificial Sequence
  Description of Artificial Sequence: Synthetic oligonucleotide
agggtaccccagcccagaca

SEQ ID NO: 359 - DNA, 20 bp, Artificial Sequence
  Description of Artificial Sequence: Synthetic oligonucleotide
agagggtaccccagcccaga

SEQ ID NO: 360 - DNA, 20 bp, Artificial Sequence
  Description of Artificial Sequence: Synthetic oligonucleotide
gtaccctctgccacctcctc

SEQ ID NO: 361 - DNA, 20 bp, Artificial Sequence
  Description of Artificial Sequence: Synthetic oligonucleotide
ccttcctcgaggaggtggca

SEQ ID NO: 362 - DNA, 20 bp, Artificial Sequence
  Description of Artificial Sequence: Synthetic oligonucleotide
atgactggcttgggcagttc

SEQ ID NO: 363 - DNA, 20 bp, Artificial Sequence
  Description of Artificial Sequence: Synthetic oligonucleotide
ggcccctgtgggccccgtcc

SEQ ID NO: 364 - DNA, 20 bp, Artificial Sequence
  Description of Artificial Sequence: Synthetic oligonucleotide
aggacgaggtctagaaggca

SEQ ID NO: 365 - DNA, 20 bp, Artificial Sequence
  Description of Artificial Sequence: Synthetic oligonucleotide
tataagtggaggcgtcgcgc

SEQ ID NO: 366 - DNA, 20 bp, Artificial Sequence
  Description of Artificial Sequence: Synthetic oligonucleotide
gggcacgcgtttaatataag

SEQ ID NO: 367 - DNA, 20 bp, Artificial Sequence
  Description of Artificial Sequence: Synthetic oligonucleotide
actcacgctggatagcctcc

SEQ ID NO: 368 - DNA, 20 bp, Artificial Sequence
  Description of Artificial Sequence: Synthetic oligonucleotide
ggccgagatgtctcgctccg

SEQ ID NO: 369 - DNA, 20 bp, Artificial Sequence
  Description of Artificial Sequence: Synthetic oligonucleotide
cacgcgtttaatataagtgg

SEQ ID NO: 370 - DNA, 20 bp, Artificial Sequence
  Description of Artificial Sequence: Synthetic oligonucleotide
aagtggaggcgtcgcgctgg

SEQ ID NO: 371 - DNA, 20 bp, Artificial Sequence
  Description of Artificial Sequence: Synthetic oligonucleotide
gagtagcgcgagcacagcta

SEQ ID NO: 372 - DNA, 20 bp, Artificial Sequence
  Description of Artificial Sequence: Synthetic oligonucleotide
agtggaggcgtcgcgctggc

SEQ ID NO: 373 - DNA, 20 bp, Artificial Sequence
  Description of Artificial Sequence: Synthetic oligonucleotide
gcccgaatgctgtcagcttc

SEQ ID NO: 374 - DNA, 20 bp, Artificial Sequence
  Description of Artificial Sequence: Synthetic oligonucleotide
cgcgagcacagctaaggcca

SEQ ID NO: 375 - DNA, 20 bp, Artificial Sequence
  Description of Artificial Sequence: Synthetic oligonucleotide
ctcgcgctactctctctttc

SEQ ID NO: 376 - DNA, 20 bp, Artificial Sequence
  Description of Artificial Sequence: Synthetic oligonucleotide
ggccacggagcgagacatct

SEQ ID NO: 377 - DNA, 20 bp, Artificial Sequence
  Description of Artificial Sequence: Synthetic oligonucleotide
cgtgagtaaacctgaatctt

SEQ ID NO: 378 - DNA, 20 bp, Artificial Sequence
  Description of Artificial Sequence: Synthetic oligonucleotide
agtcacatggttcacacggc

SEQ ID NO: 379 - DNA, 20 bp, Artificial Sequence
  Description of Artificial Sequence: Synthetic oligonucleotide
aagtcaacttcaatgtcgga

SEQ ID NO: 380 - DNA, 20 bp, Artificial Sequence
  Description of Artificial Sequence: Synthetic oligonucleotide
cagtaagtcaacttcaatgt

SEQ ID NO: 381 - DNA, 20 bp, Artificial Sequence
  Description of Artificial Sequence: Synthetic oligonucleotide
acccagacacatagcaattc

SEQ ID NO: 382 - DNA, 20 bp, Artificial Sequence
  Description of Artificial Sequence: Synthetic oligonucleotide
gcatactcatctttttcagt

SEQ ID NO: 383 - DNA, 20 bp, Artificial Sequence
  Description of Artificial Sequence: Synthetic oligonucleotide
acagcccaagatagttaagt

SEQ ID NO: 384 - DNA, 20 bp, Artificial Sequence
  Description of Artificial Sequence: Synthetic oligonucleotide
ggcatactcatctttttcag

SEQ ID NO: 385 - DNA, 20 bp, Artificial Sequence
  Description of Artificial Sequence: Synthetic oligonucleotide
ttcctgaagctgacagcatt

SEQ ID NO: 386 - DNA, 20 bp, Artificial Sequence
  Description of Artificial Sequence: Synthetic oligonucleotide
tcacgtcatccagcagagaa

SEQ ID NO: 387 - DNA, 20 bp, Artificial Sequence
  Description of Artificial Sequence: Synthetic oligonucleotide
cagcccaagatagttaagtg

SEQ ID NO: 388 - RNA, 18 nt, Artificial Sequence
  Description of Artificial Sequence: Synthetic oligonucleotide
aauucucucuccauucuu

SEQ ID NO: 389 - RNA, 19 nt, Artificial Sequence
  Description of Artificial Sequence: Synthetic oligonucleotide
aauucucucuccauucuuc

SEQ ID NO: 390 - RNA, 20 nt, Artificial Sequence
  Description of Artificial Sequence: Synthetic oligonucleotide
aauucucucuccauucuuca

SEQ ID NO: 391 - RNA, 21 nt, Artificial Sequence
  Description of Artificial Sequence: Synthetic oligonucleotide
aauucucucuccauucuucag

SEQ ID NO: 392 - RNA, 22 nt, Artificial Sequence
  Description of Artificial Sequence: Synthetic oligonucleotide
aauucucucuccauucuucagu

SEQ ID NO: 393 - RNA, 23 nt, Artificial Sequence
  Description of Artificial Sequence: Synthetic oligonucleotide
aauucucucuccauucuucagua

SEQ ID NO: 394 - RNA, 24 nt, Artificial Sequence
  Description of Artificial Sequence: Synthetic oligonucleotide
aauucucucuccauucuucaguaa

SEQ ID NO: 395 - RNA, 18 nt, Artificial Sequence
  Description of Artificial Sequence: Synthetic oligonucleotide
acuuuccauucucugcug

SEQ ID NO: 396 - RNA, 19 nt, Artificial Sequence
  Description of Artificial Sequence: Synthetic oligonucleotide
acuuuccauucucugcugg

SEQ ID NO: 397 - RNA, 20 nt, Artificial Sequence
  Description of Artificial Sequence: Synthetic oligonucleotide
acuuuccauucucugcugga

SEQ ID NO: 398 - RNA, 21 nt, Artificial Sequence
  Description of Artificial Sequence: Synthetic oligonucleotide
acuuuccauucucugcuggau

SEQ ID NO: 399 - RNA, 22 nt, Artificial Sequence
  Description of Artificial Sequence: Synthetic oligonucleotide
acuuuccauucucugcuggaug

SEQ ID NO: 400 - RNA, 23 nt, Artificial Sequence
  Description of Artificial Sequence: Synthetic oligonucleotide
acuuuccauucucugcuggauga

SEQ ID NO: 401 - RNA, 24 nt, Artificial Sequence
  Description of Artificial Sequence: Synthetic oligonucleotide
acuuuccauucucugcuggaugac

SEQ ID NO: 402 - RNA, 18 nt, Artificial Sequence
  Description of Artificial Sequence: Synthetic oligonucleotide
agcaaggacuggucuuuc

SEQ ID NO: 403 - RNA, 19 nt, Artificial Sequence
  Description of Artificial Sequence: Synthetic oligonucleotide
agcaaggacuggucuuucu

SEQ ID NO: 404 - RNA, 20 nt, Artificial Sequence
  Description of Artificial Sequence: Synthetic oligonucleotide
agcaaggacuggucuuucua

SEQ ID NO: 405 - RNA, 21 nt, Artificial Sequence
  Description of Artificial Sequence: Synthetic oligonucleotide
agcaaggacuggucuuucuau

SEQ ID NO: 406 - RNA, 22 nt, Artificial Sequence
  Description of Artificial Sequence: Synthetic oligonucleotide
agcaaggacuggucuuucuauc

SEQ ID NO: 407 - RNA, 23 nt, Artificial Sequence
  Description of Artificial Sequence: Synthetic oligonucleotide
agcaaggacuggucuuucuaucu

SEQ ID NO: 408 - RNA, 24 nt, Artificial Sequence
  Description of Artificial Sequence: Synthetic oligonucleotide
agcaaggacuggucuuucuaucuc

SEQ ID NO: 409 - RNA, 18 nt, Artificial Sequence
  Description of Artificial Sequence: Synthetic oligonucleotide
agugggggugaauucagu

SEQ ID NO: 410 - RNA, 19 nt, Artificial Sequence
  Description of Artificial Sequence: Synthetic oligonucleotide
agugggggugaauucagug

SEQ ID NO: 411 - RNA, 20 nt, Artificial Sequence
  Description of Artificial Sequence: Synthetic oligonucleotide
agugggggugaauucagugu

SEQ ID NO: 412 - RNA, 21 nt, Artificial Sequence
  Description of Artificial Sequence: Synthetic oligonucleotide
agugggggugaauucagugua

SEQ ID NO: 413 - RNA, 22 nt, Artificial Sequence
  Description of Artificial Sequence: Synthetic oligonucleotide
agugggggugaauucaguguag

SEQ ID NO: 414 - RNA, 23 nt, Artificial Sequence
  Description of Artificial Sequence: Synthetic oligonucleotide
agugggggugaauucaguguagu

SEQ ID NO: 415 - RNA, 24 nt, Artificial Sequence
  Description of Artificial Sequence: Synthetic oligonucleotide
agugggggugaauucaguguagua

SEQ ID NO: 416 - RNA, 18 nt, Artificial Sequence
  Description of Artificial Sequence: Synthetic oligonucleotide
auccauccgacauugaag

SEQ ID NO: 417 - RNA, 19 nt, Artificial Sequence
  Description of Artificial Sequence: Synthetic oligonucleotide
auccauccgacauugaagu

SEQ ID NO: 418 - RNA, 20 nt, Artificial Sequence
  Description of Artificial Sequence: Synthetic oligonucleotide
auccauccgacauugaaguu

SEQ ID NO: 419 - RNA, 21 nt, Artificial Sequence
  Description of Artificial Sequence: Synthetic oligonucleotide
auccauccgacauugaaguug

SEQ ID NO: 420 - RNA, 22 nt, Artificial Sequence
  Description of Artificial Sequence: Synthetic oligonucleotide
auccauccgacauugaaguuga

SEQ ID NO: 421 - RNA, 23 nt, Artificial Sequence
  Description of Artificial Sequence: Synthetic oligonucleotide
auccauccgacauugaaguugac

SEQ ID NO: 422 - RNA, 24 nt, Artificial Sequence
  Description of Artificial Sequence: Synthetic oligonucleotide
auccauccgacauugaaguugacu

SEQ ID NO: 423 - RNA, 18 nt, Artificial Sequence
  Description of Artificial Sequence: Synthetic oligonucleotide
caauucucucuccauucu

SEQ ID NO: 424 - RNA, 19 nt, Artificial Sequence
  Description of Artificial Sequence: Synthetic oligonucleotide
caauucucucuccauucuu

SEQ ID NO: 425 - RNA, 20 nt, Artificial Sequence
  Description of Artificial Sequence: Synthetic oligonucleotide
caauucucucuccauucuuc

SEQ ID NO: 426 - RNA, 21 nt, Artificial Sequence
  Description of Artificial Sequence: Synthetic oligonucleotide
caauucucucuccauucuuca

SEQ ID NO: 427 - RNA, 22 nt, Artificial Sequence
  Description of Artificial Sequence: Synthetic oligonucleotide
caauucucucuccauucuucag

SEQ ID NO: 428 - RNA, 23 nt, Artificial Sequence
  Description of Artificial Sequence: Synthetic oligonucleotide
caauucucucuccauucuucagu

SEQ ID NO: 429 - RNA, 24 nt, Artificial Sequence
  Description of Artificial Sequence: Synthetic oligonucleotide
caauucucucuccauucuucagua

SEQ ID NO: 430 - RNA, 18 nt, Artificial Sequence
  Description of Artificial Sequence: Synthetic oligonucleotide
cagugggggugaauucag

SEQ ID NO: 431 - RNA, 19 nt, Artificial Sequence
  Description of Artificial Sequence: Synthetic oligonucleotide
cagugggggugaauucagu

SEQ ID NO: 432 - RNA, 20 nt, Artificial Sequence
  Description of Artificial Sequence: Synthetic oligonucleotide
cagugggggugaauucagug

SEQ ID NO: 433 - RNA, 21 nt, Artificial Sequence
  Description of Artificial Sequence: Synthetic oligonucleotide
cagugggggugaauucagugu

SEQ ID NO: 434 - RNA, 22 nt, Artificial Sequence
  Description of Artificial Sequence: Synthetic oligonucleotide
cagugggggugaauucagugua

SEQ ID NO: 435 - RNA, 23 nt, Artificial Sequence
  Description of Artificial Sequence: Synthetic oligonucleotide
cagugggggugaauucaguguag

SEQ ID NO: 436 - RNA, 24 nt, Artificial Sequence
  Description of Artificial Sequence: Synthetic oligonucleotide
cagugggggugaauucaguguagu

SEQ ID NO: 437 - RNA, 18 nt, Artificial Sequence
  Description of Artificial Sequence: Synthetic oligonucleotide
cauucucugcuggaugac

SEQ ID NO: 438 - RNA, 19 nt, Artificial Sequence
  Description of Artificial Sequence: Synthetic oligonucleotide
cauucucugcuggaugacg

SEQ ID NO: 439 - RNA, 20 nt, Artificial Sequence
  Description of Artificial Sequence: Synthetic oligonucleotide
cauucucugcuggaugacgu

SEQ ID NO: 440 - RNA, 21 nt, Artificial Sequence
  Description of Artificial Sequence: Synthetic oligonucleotide
cauucucugcuggaugacgug

SEQ ID NO: 441 - RNA, 22 nt, Artificial Sequence
  Description of Artificial Sequence: Synthetic oligonucleotide
cauucucugcuggaugacguga

SEQ ID NO: 442 - RNA, 23 nt, Artificial Sequence
  Description of Artificial Sequence: Synthetic oligonucleotide
cauucucugcuggaugacgugag

SEQ ID NO: 443 - RNA, 24 nt, Artificial Sequence
  Description of Artificial Sequence: Synthetic oligonucleotide
cauucucugcuggaugacgugagu

SEQ ID NO: 444 - RNA, 18 nt, Artificial Sequence
  Description of Artificial Sequence: Synthetic oligonucleotide
cccgauauuccucaggua

SEQ ID NO: 445 - RNA, 19 nt, Artificial Sequence
  Description of Artificial Sequence: Synthetic oligonucleotide
cccgauauuccucagguac

SEQ ID NO: 446 - RNA, 20 nt, Artificial Sequence
  Description of Artificial Sequence: Synthetic oligonucleotide
cccgauauuccucagguacu

SEQ ID NO: 447 - RNA, 21 nt, Artificial Sequence
  Description of Artificial Sequence: Synthetic oligonucleotide
cccgauauuccucagguacuc

SEQ ID NO: 448 - RNA, 22 nt, Artificial Sequence
  Description of Artificial Sequence: Synthetic oligonucleotide
cccgauauuccucagguacucc

SEQ ID NO: 449 - RNA, 23 nt, Artificial Sequence
  Description of Artificial Sequence: Synthetic oligonucleotide
cccgauauuccucagguacucca

SEQ ID NO: 450 - RNA, 24 nt, Artificial Sequence
  Description of Artificial Sequence: Synthetic oligonucleotide
cccgauauuccucagguacuccaa

SEQ ID NO: 451 - RNA, 18 nt, Artificial Sequence
  Description of Artificial Sequence: Synthetic oligonucleotide
ccgauauuccucagguac

SEQ ID NO: 452 - RNA, 19 nt, Artificial Sequence
  Description of Artificial Sequence: Synthetic oligonucleotide
ccgauauuccucagguacu

SEQ ID NO: 453 - RNA, 20 nt, Artificial Sequence
  Description of Artificial Sequence: Synthetic oligonucleotide
ccgauauuccucagguacuc

SEQ ID NO: 454 - RNA, 21 nt, Artificial Sequence
  Description of Artificial Sequence: Synthetic oligonucleotide
ccgauauuccucagguacucc

SEQ ID NO: 455 - RNA, 22 nt, Artificial Sequence
  Description of Artificial Sequence: Synthetic oligonucleotide
ccgauauuccucagguacucca

SEQ ID NO: 456 - RNA, 23 nt, Artificial Sequence
  Description of Artificial Sequence: Synthetic oligonucleotide
ccgauauuccucagguacuccaa

SEQ ID NO: 457 - RNA, 24 nt, Artificial Sequence
  Description of Artificial Sequence: Synthetic oligonucleotide
ccgauauuccucagguacuccaaa

SEQ ID NO: 458 - RNA, 18 nt, Artificial Sequence
  Description of Artificial Sequence: Synthetic oligonucleotide
cucacgucauccagcaga

SEQ ID NO: 459 - RNA, 19 nt, Artificial Sequence
  Description of Artificial Sequence: Synthetic oligonucleotide
cucacgucauccagcagag

SEQ ID NO: 460 - RNA, 20 nt, Artificial Sequence
  Description of Artificial Sequence: Synthetic oligonucleotide
cucacgucauccagcagaga

SEQ ID NO: 461 - RNA, 21 nt, Artificial Sequence
  Description of Artificial Sequence: Synthetic oligonucleotide
cucacgucauccagcagagaa

SEQ ID NO: 462 - RNA, 22 nt, Artificial Sequence
  Description of Artificial Sequence: Synthetic oligonucleotide
cucacgucauccagcagagaau

SEQ ID NO: 463 - RNA, 23 nt, Artificial Sequence
  Description of Artificial Sequence: Synthetic oligonucleotide
cucacgucauccagcagagaaug

SEQ ID NO: 464 - RNA, 24 nt, Artificial Sequence
  Description of Artificial Sequence: Synthetic oligonucleotide
cucacgucauccagcagagaaugg

SEQ ID NO: 465 - RNA, 18 nt, Artificial Sequence
  Description of Artificial Sequence: Synthetic oligonucleotide
cugaauugcuaugugucu

SEQ ID NO: 466 - RNA, 19 nt, Artificial Sequence
  Description of Artificial Sequence: Synthetic oligonucleotide
cugaauugcuaugugucug

SEQ ID NO: 467 - RNA, 20 nt, Artificial Sequence
  Description of Artificial Sequence: Synthetic oligonucleotide
cugaauugcuaugugucugg

SEQ ID NO: 468 - RNA, 21 nt, Artificial Sequence
  Description of Artificial Sequence: Synthetic oligonucleotide
cugaauugcuaugugucuggg

SEQ ID NO: 469 - RNA, 22 nt, Artificial Sequence
  Description of Artificial Sequence: Synthetic oligonucleotide
cugaauugcuaugugucugggu

SEQ ID NO: 470 - RNA, 23 nt, Artificial Sequence
  Description of Artificial Sequence: Synthetic oligonucleotide
cugaauugcuaugugucuggguu

SEQ ID NO: 471 - RNA, 24 nt, Artificial Sequence
  Description of Artificial Sequence: Synthetic oligonucleotide
cugaauugcuaugugucuggguuu

SEQ ID NO: 472 - RNA, 18 nt, Artificial Sequence
  Description of Artificial Sequence: Synthetic oligonucleotide
gaguaccugaggaauauc

SEQ ID NO: 473 - RNA, 19 nt, Artificial Sequence
  Description of Artificial Sequence: Synthetic oligonucleotide
gaguaccugaggaauaucg

SEQ ID NO: 474 - RNA, 20 nt, Artificial Sequence
  Description of Artificial Sequence: Synthetic oligonucleotide
gaguaccugaggaauaucgg

SEQ ID NO: 475 - RNA, 21 nt, Artificial Sequence
  Description of Artificial Sequence: Synthetic oligonucleotide
gaguaccugaggaauaucggg

SEQ ID NO: 476 - RNA, 22 nt, Artificial Sequence
  Description of Artificial Sequence: Synthetic oligonucleotide
gaguaccugaggaauaucggga

SEQ ID NO: 477 - RNA, 23 nt, Artificial Sequence
  Description of Artificial Sequence: Synthetic oligonucleotide
gaguaccugaggaauaucgggaa

SEQ ID NO: 478 - RNA, 24 nt, Artificial Sequence
  Description of Artificial Sequence: Synthetic oligonucleotide
gaguaccugaggaauaucgggaaa

SEQ ID NO: 479 - RNA, 18 nt, Artificial Sequence
  Description of Artificial Sequence: Synthetic oligonucleotide
uaucucuuguacuacacu

SEQ ID NO: 480 - RNA, 19 nt, Artificial Sequence
  Description of Artificial Sequence: Synthetic oligonucleotide
uaucucuuguacuacacug

SEQ ID NO: 481 - RNA, 20 nt, Artificial Sequence
  Description of Artificial Sequence: Synthetic oligonucleotide
uaucucuuguacuacacuga

SEQ ID NO: 482 - RNA, 21 nt, Artificial Sequence
  Description of Artificial Sequence: Synthetic oligonucleotide
uaucucuuguacuacacugaa

SEQ ID NO: 483 - RNA, 22 nt, Artificial Sequence
  Description of Artificial Sequence: Synthetic oligonucleotide
uaucucuuguacuacacugaau

SEQ ID NO: 484 - RNA, 23 nt, Artificial Sequence
  Description of Artificial Sequence: Synthetic oligonucleotide
uaucucuuguacuacacugaauu

SEQ ID NO: 485 - RNA, 24 nt, Artificial Sequence
  Description of Artificial Sequence: Synthetic oligonucleotide
uaucucuuguacuacacugaauuc

SEQ ID NO: 486 - RNA, 18 nt, Artificial Sequence
  Description of Artificial Sequence: Synthetic oligonucleotide
ucaauucucucuccauuc

SEQ ID NO: 487 - RNA, 19 nt, Artificial Sequence
  Description of Artificial Sequence: Synthetic oligonucleotide
ucaauucucucuccauucu

SEQ ID NO: 488 - RNA, 20 nt, Artificial Sequence
  Description of Artificial Sequence: Synthetic oligonucleotide
ucaauucucucuccauucuu

SEQ ID NO: 489 - RNA, 21 nt, Artificial Sequence
  Description of Artificial Sequence: Synthetic oligonucleotide
ucaauucucucuccauucuuc

SEQ ID NO: 490 - RNA, 22 nt, Artificial Sequence
  Description of Artificial Sequence: Synthetic oligonucleotide
ucaauucucucuccauucuuca

SEQ ID NO: 491 - RNA, 23 nt, Artificial Sequence
  Description of Artificial Sequence: Synthetic oligonucleotide
ucaauucucucuccauucuucag

SEQ ID NO: 492 - RNA, 24 nt, Artificial Sequence
  Description of Artificial Sequence: Synthetic oligonucleotide
ucaauucucucuccauucuucagu

SEQ ID NO: 493 - RNA, 18 nt, Artificial Sequence
  Description of Artificial Sequence: Synthetic oligonucleotide
ucacagcccaagauaguu

SEQ ID NO: 494 - RNA, 19 nt, Artificial Sequence
  Description of Artificial Sequence: Synthetic oligonucleotide
ucacagcccaagauaguua

SEQ ID NO: 495 - RNA, 20 nt, Artificial Sequence
  Description of Artificial Sequence: Synthetic oligonucleotide
ucacagcccaagauaguuaa

SEQ ID NO: 496 - RNA, 21 nt, Artificial Sequence
  Description of Artificial Sequence: Synthetic oligonucleotide
ucacagcccaagauaguuaag

SEQ ID NO: 497 - RNA, 22 nt, Artificial Sequence
  Description of Artificial Sequence: Synthetic oligonucleotide
ucacagcccaagauaguuaagu

SEQ ID NO: 498 - RNA, 23 nt, Artificial Sequence
  Description of Artificial Sequence: Synthetic oligonucleotide
ucacagcccaagauaguuaagug

SEQ ID NO: 499 - RNA, 24 nt, Artificial Sequence
  Description of Artificial Sequence: Synthetic oligonucleotide
ucacagcccaagauaguuaagugg

SEQ ID NO: 500 - RNA, 18 nt, Artificial Sequence
  Description of Artificial Sequence: Synthetic oligonucleotide
ucagugggggugaauuca

SEQ ID NO: 501 - RNA, 19 nt, Artificial Sequence
  Description of Artificial Sequence: Synthetic oligonucleotide
ucagugggggugaauucag

SEQ ID NO: 502 - RNA, 20 nt, Artificial Sequence
  Description of Artificial Sequence: Synthetic oligonucleotide
ucagugggggugaauucagu

SEQ ID NO: 503 - RNA, 21 nt, Artificial Sequence
  Description of Artificial Sequence: Synthetic oligonucleotide
ucagugggggugaauucagug

SEQ ID NO: 504 - RNA, 22 nt, Artificial Sequence
  Description of Artificial Sequence: Synthetic oligonucleotide
ucagugggggugaauucagugu

SEQ ID NO: 505 - RNA, 23 nt, Artificial Sequence
  Description of Artificial Sequence: Synthetic oligonucleotide
ucagugggggugaauucagugua

SEQ ID NO: 506 - RNA, 24 nt, Artificial Sequence
  Description of Artificial Sequence: Synthetic oligonucleotide
ucagugggggugaauucaguguag

SEQ ID NO: 507 - RNA, 18 nt, Artificial Sequence
  Description of Artificial Sequence: Synthetic oligonucleotide
uggccuggaggcuaucca

SEQ ID NO: 508 - RNA, 19 nt, Artificial Sequence
  Description of Artificial Sequence: Synthetic oligonucleotide
uggccuggaggcuauccag

SEQ ID NO: 509 - RNA, 20 nt, Artificial Sequence
  Description of Artificial Sequence: Synthetic oligonucleotide
uggccuggaggcuauccagc

SEQ ID NO: 510 - RNA, 21 nt, Artificial Sequence
  Description of Artificial Sequence: Synthetic oligonucleotide
uggccuggaggcuauccagcg

SEQ ID NO: 511 - RNA, 22 nt, Artificial Sequence
  Description of Artificial Sequence: Synthetic oligonucleotide
uggccuggaggcuauccagcgu

SEQ ID NO: 512 - RNA, 23 nt, Artificial Sequence
  Description of Artificial Sequence: Synthetic oligonucleotide
uggccuggaggcuauccagcgug

SEQ ID NO: 513 - RNA, 24 nt, Artificial Sequence
  Description of Artificial Sequence: Synthetic oligonucleotide
uggccuggaggcuauccagcguga

SEQ ID NO: 514 - RNA, 18 nt, Artificial Sequence
  Description of Artificial Sequence: Synthetic oligonucleotide
auagaucgagacauguaa

SEQ ID NO: 515 - RNA, 19 nt, Artificial Sequence
  Description of Artificial Sequence: Synthetic oligonucleotide
auagaucgagacauguaag

SEQ ID NO: 516 - RNA, 20 nt, Artificial Sequence
  Description of Artificial Sequence: Synthetic oligonucleotide
auagaucgagacauguaagc

SEQ ID NO: 517 - RNA, 21 nt, Artificial Sequence
  Description of Artificial Sequence: Synthetic oligonucleotide
auagaucgagacauguaagca

SEQ ID NO: 518 - RNA, 22 nt, Artificial Sequence
  Description of Artificial Sequence: Synthetic oligonucleotide
auagaucgagacauguaagcag

SEQ ID NO: 519 - RNA, 23 nt, Artificial Sequence
  Description of Artificial Sequence: Synthetic oligonucleotide
auagaucgagacauguaagcagc

SEQ ID NO: 520 - RNA, 24 nt, Artificial Sequence
  Description of Artificial Sequence: Synthetic oligonucleotide
auagaucgagacauguaagcagca

SEQ ID NO: 521 - RNA, 18 nt, Artificial Sequence
  Description of Artificial Sequence: Synthetic oligonucleotide
cauagaucgagacaugua

SEQ ID NO: 522 - RNA, 19 nt, Artificial Sequence
  Description of Artificial Sequence: Synthetic oligonucleotide
cauagaucgagacauguaa

SEQ ID NO: 523 - RNA, 20 nt, Artificial Sequence
  Description of Artificial Sequence: Synthetic oligonucleotide
cauagaucgagacauguaag

SEQ ID NO: 524 - RNA, 21 nt, Artificial Sequence
  Description of Artificial Sequence: Synthetic oligonucleotide
cauagaucgagacauguaagc

SEQ ID NO: 525 - RNA, 22 nt, Artificial Sequence
  Description of Artificial Sequence: Synthetic oligonucleotide
cauagaucgagacauguaagca

SEQ ID NO: 526 - RNA, 23 nt, Artificial Sequence
  Description of Artificial Sequence: Synthetic oligonucleotide
cauagaucgagacauguaagcag

SEQ ID NO: 527 - RNA, 24 nt, Artificial Sequence
  Description of Artificial Sequence: Synthetic oligonucleotide
cauagaucgagacauguaagcagc

SEQ ID NO: 528 - RNA, 18 nt, Artificial Sequence
  Description of Artificial Sequence: Synthetic oligonucleotide
cuccacugucuuuuucau

SEQ ID NO: 529 - RNA, 19 nt, Artificial Sequence
  Description of Artificial Sequence: Synthetic oligonucleotide
cuccacugucuuuuucaua

SEQ ID NO: 530 - RNA, 20 nt, Artificial Sequence
  Description of Artificial Sequence: Synthetic oligonucleotide
cuccacugucuuuuucauag

SEQ ID NO: 531 - RNA, 21 nt, Artificial Sequence
  Description of Artificial Sequence: Synthetic oligonucleotide
cuccacugucuuuuucauaga

SEQ ID NO: 532 - RNA, 22 nt, Artificial Sequence
  Description of Artificial Sequence: Synthetic oligonucleotide
cuccacugucuuuuucauagau

SEQ ID NO: 533 - RNA, 23 nt, Artificial Sequence
  Description of Artificial Sequence: Synthetic oligonucleotide
cuccacugucuuuuucauagauc

SEQ ID NO: 534 - RNA, 24 nt, Artificial Sequence
  Description of Artificial Sequence: Synthetic oligonucleotide
cuccacugucuuuuucauagaucg

SEQ ID NO: 535 - RNA, 18 nt, Artificial Sequence
  Description of Artificial Sequence: Synthetic oligonucleotide
ucauagaucgagacaugu

SEQ ID NO: 536 - RNA, 19 nt, Artificial Sequence
  Description of Artificial Sequence: Synthetic oligonucleotide
ucauagaucgagacaugua

SEQ ID NO: 537 - RNA, 20 nt, Artificial Sequence
  Description of Artificial Sequence: Synthetic oligonucleotide
ucauagaucgagacauguaa

SEQ ID NO: 538 - RNA, 21 nt, Artificial Sequence
  Description of Artificial Sequence: Synthetic oligonucleotide
ucauagaucgagacauguaag

SEQ ID NO: 539 - RNA, 22 nt, Artificial Sequence
  Description of Artificial Sequence: Synthetic oligonucleotide
ucauagaucgagacauguaagc

SEQ ID NO: 540 - RNA, 23 nt, Artificial Sequence
  Description of Artificial Sequence: Synthetic oligonucleotide
ucauagaucgagacauguaagca

SEQ ID NO: 541 - RNA, 24 nt, Artificial Sequence
  Description of Artificial Sequence: Synthetic oligonucleotide
ucauagaucgagacauguaagcag

SEQ ID NO: 542 - RNA, 18 nt, Artificial Sequence
  Description of Artificial Sequence: Synthetic oligonucleotide
uccacugucuuuuucaua

SEQ ID NO: 543 - RNA, 19 nt, Artificial Sequence
  Description of Artificial Sequence: Synthetic oligonucleotide
uccacugucuuuuucauag

SEQ ID NO: 544 - RNA, 20 nt, Artificial Sequence
  Description of Artificial Sequence: Synthetic oligonucleotide
uccacugucuuuuucauaga

SEQ ID NO: 545 - RNA, 21 nt, Artificial Sequence
  Description of Artificial Sequence: Synthetic oligonucleotide
uccacugucuuuuucauagau

SEQ ID NO: 546 - RNA, 22 nt, Artificial Sequence
  Description of Artificial Sequence: Synthetic oligonucleotide
uccacugucuuuuucauagauc

SEQ ID NO: 547 - RNA, 23 nt, Artificial Sequence
  Description of Artificial Sequence: Synthetic oligonucleotide
uccacugucuuuuucauagaucg

SEQ ID NO: 548 - RNA, 24 nt, Artificial Sequence
  Description of Artificial Sequence: Synthetic oligonucleotide
uccacugucuuuuucauagaucga

SEQ ID NO: 549 - RNA, 18 nt, Artificial Sequence
  Description of Artificial Sequence: Synthetic oligonucleotide
ucuccacugucuuuuuca

SEQ ID NO: 550 - RNA, 19 nt, Artificial Sequence
  Description of Artificial Sequence: Synthetic oligonucleotide
ucuccacugucuuuuucau

SEQ ID NO: 551 - RNA, 20 nt, Artificial Sequence
  Description of Artificial Sequence: Synthetic oligonucleotide
ucuccacugucuuuuucaua

SEQ ID NO: 552 - RNA, 21 nt, Artificial Sequence
  Description of Artificial Sequence: Synthetic oligonucleotide
ucuccacugucuuuuucauag

SEQ ID NO: 553 - RNA, 22 nt, Artificial Sequence
  Description of Artificial Sequence: Synthetic oligonucleotide
ucuccacugucuuuuucauaga

SEQ ID NO: 554 - RNA, 23 nt, Artificial Sequence
  Description of Artificial Sequence: Synthetic oligonucleotide
ucuccacugucuuuuucauagau

SEQ ID NO: 555 - RNA, 24 nt, Artificial Sequence
  Description of Artificial Sequence: Synthetic oligonucleotide
ucuccacugucuuuuucauagauc

SEQ ID NO: 556 - RNA, 18 nt, Artificial Sequence
  Description of Artificial Sequence: Synthetic oligonucleotide
uucuccacugucuuuuuc

SEQ ID NO: 557 - RNA, 19 nt, Artificial Sequence
  Description of Artificial Sequence: Synthetic oligonucleotide
uucuccacugucuuuuuca

SEQ ID NO: 558 - RNA, 20 nt, Artificial Sequence
  Description of Artificial Sequence: Synthetic oligonucleotide
uucuccacugucuuuuucau

SEQ ID NO: 559 - RNA, 21 nt, Artificial Sequence
  Description of Artificial Sequence: Synthetic oligonucleotide
uucuccacugucuuuuucaua

SEQ ID NO: 560 - RNA, 22 nt, Artificial Sequence
  Description of Artificial Sequence: Synthetic oligonucleotide
uucuccacugucuuuuucauag

SEQ ID NO: 561 - RNA, 23 nt, Artificial Sequence
  Description of Artificial Sequence: Synthetic oligonucleotide
uucuccacugucuuuuucauaga

SEQ ID NO: 562 - RNA, 24 nt, Artificial Sequence
  Description of Artificial Sequence: Synthetic oligonucleotide
uucuccacugucuuuuucauagau

SEQ ID NO: 563 - RNA, 18 nt, Artificial Sequence
  Description of Artificial Sequence: Synthetic oligonucleotide
uuucuccacugucuuuuu

SEQ ID NO: 564 - RNA, 19 nt, Artificial Sequence
  Description of Artificial Sequence: Synthetic oligonucleotide
uuucuccacugucuuuuuc

SEQ ID NO: 565 - RNA, 20 nt, Artificial Sequence
  Description of Artificial Sequence: Synthetic oligonucleotide
uuucuccacugucuuuuuca

SEQ ID NO: 566 - RNA, 21 nt, Artificial Sequence
  Description of Artificial Sequence: Synthetic oligonucleotide
uuucuccacugucuuuuucau

SEQ ID NO: 567 - RNA, 22 nt, Artificial Sequence
  Description of Artificial Sequence: Synthetic oligonucleotide
uuucuccacugucuuuuucaua

SEQ ID NO: 568 - RNA, 23 nt, Artificial Sequence
  Description of Artificial Sequence: Synthetic oligonucleotide
uuucuccacugucuuuuucauag

SEQ ID NO: 569 - RNA, 24 nt, Artificial Sequence
  Description of Artificial Sequence: Synthetic oligonucleotide
uuucuccacugucuuuuucauaga

SEQ ID NO: 570 - RNA, 18 nt, Artificial Sequence
  Description of Artificial Sequence: Synthetic oligonucleotide
uuuucuccacugucuuuu

SEQ ID NO: 571 - RNA, 19 nt, Artificial Sequence
  Description of Artificial Sequence: Synthetic oligonucleotide
uuuucuccacugucuuuuu

SEQ ID NO: 572 - RNA, 20 nt, Artificial Sequence
  Description of Artificial Sequence: Synthetic oligonucleotide
uuuucuccacugucuuuuuc

SEQ ID NO: 573 - RNA, 21 nt, Artificial Sequence
  Description of Artificial Sequence: Synthetic oligonucleotide
uuuucuccacugucuuuuuca

SEQ ID NO: 574 - RNA, 22 nt, Artificial Sequence
  Description of Artificial Sequence: Synthetic oligonucleotide
uuuucuccacugucuuuuucau

SEQ ID NO: 575 - RNA, 23 nt, Artificial Sequence
  Description of Artificial Sequence: Synthetic oligonucleotide
uuuucuccacugucuuuuucaua

SEQ ID NO: 576 - RNA, 24 nt, Artificial Sequence
  Description of Artificial Sequence: Synthetic oligonucleotide
uuuucuccacugucuuuuucauag

SEQ ID NO: 577 - DNA, 21 bp, Artificial Sequence
  Description of Artificial Sequence: Synthetic oligonucleotide
gaggtaaagcgtttgcatttg

SEQ ID NO: 578 - DNA, 21 bp, Artificial Sequence
  Description of Artificial Sequence: Synthetic oligonucleotide
cctctaaagcttatgcttaca

SEQ ID NO: 579 - DNA, 21 bp, Artificial Sequence
  Description of Artificial Sequence: Synthetic oligonucleotide
agtcgatttacttgtagcact

SEQ ID NO: 580 - DNA, 21 bp, Artificial Sequence
  Description of Artificial Sequence: Synthetic oligonucleotide
cttgtagcactgcacagttaa

SEQ ID NO: 581 - DNA, 21 bp, Artificial Sequence
  Description of Artificial Sequence: Synthetic oligonucleotide
tccattacaggataaaagact

SEQ ID NO: 582 - DNA, 21 bp, Artificial Sequence
  Description of Artificial Sequence: Synthetic oligonucleotide
ctccattacaggataaaagac

SEQ ID NO: 583 - DNA, 21 bp, Artificial Sequence
  Description of Artificial Sequence: Synthetic oligonucleotide
tctccattacaggataaaaga

SEQ ID NO: 584 - DNA, 21 bp, Artificial Sequence
  Description of Artificial Sequence: Synthetic oligonucleotide
atcctgtaatggagaaaaatc

SEQ ID NO: 585 - DNA, 21 bp, Artificial Sequence
  Description of Artificial Sequence: Synthetic oligonucleotide
tcctgtaatggagaaaaatcc

SEQ ID NO: 586 - DNA, 21 bp, Artificial Sequence
  Description of Artificial Sequence: Synthetic oligonucleotide
aaacatgagtaagttgttttg

SEQ ID NO: 587 - DNA, 21 bp, Artificial Sequence
  Description of Artificial Sequence: Synthetic oligonucleotide
gctttcaaacatgagtaagtt

SEQ ID NO: 588 - DNA, 21 bp, Artificial Sequence
  Description of Artificial Sequence: Synthetic oligonucleotide
aaagccaaaccattcattgtc

SEQ ID NO: 589 - DNA, 21 bp, Artificial Sequence
  Description of Artificial Sequence: Synthetic oligonucleotide
gtaacagcagtcatcatccat

SEQ ID NO: 590 - DNA, 21 bp, Artificial Sequence
  Description of Artificial Sequence: Synthetic oligonucleotide
accatcctcatggattggtgt

SEQ ID NO: 591 - DNA, 21 bp, Artificial Sequence
  Description of Artificial Sequence: Synthetic oligonucleotide
tgtccatcatttcaccatcct

SEQ ID NO: 592 - DNA, 21 bp, Artificial Sequence
  Description of Artificial Sequence: Synthetic oligonucleotide
gaaatttctgtccatcatttc

SEQ ID NO: 593 - DNA, 21 bp, Artificial Sequence
  Description of Artificial Sequence: Synthetic oligonucleotide
agaaatttctgtccatcattt

SEQ ID NO: 594 - DNA, 21 bp, Artificial Sequence
  Description of Artificial Sequence: Synthetic oligonucleotide
ttttagaaatttctgtccatc

SEQ ID NO: 595 - DNA, 21 bp, Artificial Sequence
  Description of Artificial Sequence: Synthetic oligonucleotide
cttttagaaatttctgtccat

SEQ ID NO: 596 - DNA, 21 bp, Artificial Sequence
  Description of Artificial Sequence: Synthetic oligonucleotide
ttttcttttagaaatttctgt

SEQ ID NO: 597 - DNA, 21 bp, Artificial Sequence
  Description of Artificial Sequence: Synthetic oligonucleotide
taaaagaaaagaaagaatttt

SEQ ID NO: 598 - DNA, 21 bp, Artificial Sequence
  Description of Artificial Sequence: Synthetic oligonucleotide
aaacatttacatcttaccatt

SEQ ID NO: 599 - DNA, 21 bp, Artificial Sequence
  Description of Artificial Sequence: Synthetic oligonucleotide
catcttaccatttcttcttca

SEQ ID NO: 600 - DNA, 21 bp, Artificial Sequence
  Description of Artificial Sequence: Synthetic oligonucleotide
tatagataatgaagaagaaat

SEQ ID NO: 601 - DNA, 21 bp, Artificial Sequence
  Description of Artificial Sequence: Synthetic oligonucleotide
ttcttcattatctatagaaag

SEQ ID NO: 602 - DNA, 21 bp, Artificial Sequence
  Description of Artificial Sequence: Synthetic oligonucleotide
ctggcctgtacttcgaagaac

SEQ ID NO: 603 - DNA, 21 bp, Artificial Sequence
  Description of Artificial Sequence: Synthetic oligonucleotide
cttaccaatgtagtaacaact

SEQ ID NO: 604 - DNA, 21 bp, Artificial Sequence
  Description of Artificial Sequence: Synthetic oligonucleotide
gcacgtcattgtggccattgt

SEQ ID NO: 605 - DNA, 21 bp, Artificial Sequence
  Description of Artificial Sequence: Synthetic oligonucleotide
tttagcacgtcattgtggcca

SEQ ID NO: 606 - DNA, 21 bp, Artificial Sequence
  Description of Artificial Sequence: Synthetic oligonucleotide
ccatcagctccagagaagctc

SEQ ID NO: 607 - DNA, 21 bp, Artificial Sequence
  Description of Artificial Sequence: Synthetic oligonucleotide
tctccctgcagatttaccatc

SEQ ID NO: 608 - DNA, 21 bp, Artificial Sequence
  Description of Artificial Sequence: Synthetic oligonucleotide
aaatgctttacctttgcagtg

SEQ ID NO: 609 - DNA, 21 bp, Artificial Sequence
  Description of Artificial Sequence: Synthetic oligonucleotide
aatgctttacctttgcagtga

SEQ ID NO: 610 - DNA, 21 bp, Artificial Sequence
  Description of Artificial Sequence: Synthetic oligonucleotide
cctttgcagtgataggttttg

SEQ ID NO: 611 - DNA, 21 bp, Artificial Sequence
  Description of Artificial Sequence: Synthetic oligonucleotide
cagtgataggttttgtcattc

SEQ ID NO: 612 - DNA, 21 bp, Artificial Sequence
  Description of Artificial Sequence: Synthetic oligonucleotide
aagggaatgacaaaacctatc

SEQ ID NO: 613 - DNA, 21 bp, Artificial Sequence
  Description of Artificial Sequence: Synthetic oligonucleotide
caagggaatgacaaaacctat

SEQ ID NO: 614 - DNA, 21 bp, Artificial Sequence
  Description of Artificial Sequence: Synthetic oligonucleotide
gtcattcccttgaaaatcctg

SEQ ID NO: 615 - DNA, 21 bp, Artificial Sequence
  Description of Artificial Sequence: Synthetic oligonucleotide
tcattcccttgaaaatcctga

SEQ ID NO: 616 - DNA, 21 bp, Artificial Sequence
  Description of Artificial Sequence: Synthetic oligonucleotide
tgaaggtttaattccgcatag

SEQ ID NO: 617 - DNA, 21 bp, Artificial Sequence
  Description of Artificial Sequence: Synthetic oligonucleotide
gaaggtttaattccgcatagg

SEQ ID NO: 618 - DNA, 21 bp, Artificial Sequence
  Description of Artificial Sequence: Synthetic oligonucleotide
aaggtttaattccgcataggt

SEQ ID NO: 619 - DNA, 21 bp, Artificial Sequence
  Description of Artificial Sequence: Synthetic oligonucleotide
attccgcataggttatttcct

SEQ ID NO: 620 - DNA, 21 bp, Artificial Sequence
  Description of Artificial Sequence: Synthetic oligonucleotide
gcaactgaacaggaaataacc

SEQ ID NO: 621 - DNA, 21 bp, Artificial Sequence
  Description of Artificial Sequence: Synthetic oligonucleotide
agcaactgaacaggaaataac

SEQ ID NO: 622 - DNA, 21 bp, Artificial Sequence
  Description of Artificial Sequence: Synthetic oligonucleotide
ctgttcagttgctaaaatgga

SEQ ID NO: 623 - DNA, 21 bp, Artificial Sequence
  Description of Artificial Sequence: Synthetic oligonucleotide
tattgcctttaggttttcgtt

SEQ ID NO: 624 - DNA, 21 bp, Artificial Sequence
  Description of Artificial Sequence: Synthetic oligonucleotide
attgcctttaggttttcgttg

SEQ ID NO: 625 - DNA, 21 bp, Artificial Sequence
  Description of Artificial Sequence: Synthetic oligonucleotide
ttgcctttaggttttcgttgc

SEQ ID NO: 626 - DNA, 21 bp, Artificial Sequence
  Description of Artificial Sequence: Synthetic oligonucleotide
ggttttcgttgctgcctcttt

SEQ ID NO: 627 - DNA, 21 bp, Artificial Sequence
  Description of Artificial Sequence: Synthetic oligonucleotide
cgttgctgcctctttgggttt

SEQ ID NO: 628 - DNA, 21 bp, Artificial Sequence
  Description of Artificial Sequence: Synthetic oligonucleotide
gttgctgcctctttgggtttg

SEQ ID NO: 629 - DNA, 21 bp, Artificial Sequence
  Description of Artificial Sequence: Synthetic oligonucleotide
ggtttgggggcagattcaggt

SEQ ID NO: 630 - DNA, 21 bp, Artificial Sequence
  Description of Artificial Sequence: Synthetic oligonucleotide
ggggcagattcaggtctgagt

SEQ ID NO: 631 - DNA, 20 bp, Artificial Sequence
  Description of Artificial Sequence: Synthetic oligonucleotide
tctgcagaaatgttccccgt

SEQ ID NO: 632 - DNA, 20 bp, Artificial Sequence
  Description of Artificial Sequence: Synthetic oligonucleotide
tgcagagaaaggtggctcta

SEQ ID NO: 633 - DNA, 20 bp, Artificial Sequence
  Description of Artificial Sequence: Synthetic oligonucleotide
taatgctgacttggggtggc

SEQ ID NO: 634 - DNA, 20 bp, Artificial Sequence
  Description of Artificial Sequence: Synthetic oligonucleotide
taggacctccaggaagattc

SEQ ID NO: 635 - DNA, 20 bp, Artificial Sequence
  Description of Artificial Sequence: Synthetic oligonucleotide
tagtcaacgcgaccaccacg

SEQ ID NO: 636 - DNA, 20 bp, Artificial Sequence
  Description of Artificial Sequence: Synthetic oligonucleotide
tcctgaggtcaccttccaca

SEQ ID NO: 637 - DNA, 20 bp, Artificial Sequence
  Description of Artificial Sequence: Synthetic oligonucleotide
tattgtgcctgtcatcattc

SEQ ID NO: 638 - DNA, 21 bp, Artificial Sequence
  Description of Artificial Sequence: Synthetic oligonucleotide
tgacaggcacaatagaaacaa

SEQ ID NO: 639 - DNA, 21 bp, Artificial Sequence
  Description of Artificial Sequence: Synthetic oligonucleotide
gacaggcacaatagaaacaac

SEQ ID NO: 640 - DNA, 21 bp, Artificial Sequence
  Description of Artificial Sequence: Synthetic oligonucleotide
aaacaacggggaacatttctg

SEQ ID NO: 641 - DNA, 21 bp, Artificial Sequence
  Description of Artificial Sequence: Synthetic oligonucleotide
acaacggggaacatttctgca

SEQ ID NO: 642 - DNA, 21 bp, Artificial Sequence
  Description of Artificial Sequence: Synthetic oligonucleotide
tgatagagccacctttctctg

SEQ ID NO: 643 - DNA, 21 bp, Artificial Sequence
  Description of Artificial Sequence: Synthetic oligonucleotide
gggtcacttgtgccgtggtgg

SEQ ID NO: 644 - DNA, 21 bp, Artificial Sequence
  Description of Artificial Sequence: Synthetic oligonucleotide
ggcacaagtgacccaggtcaa

SEQ ID NO: 645 - DNA, 21 bp, Artificial Sequence
  Description of Artificial Sequence: Synthetic oligonucleotide
gtcctgctgctcccagttgac

SEQ ID NO: 646 - DNA, 21 bp, Artificial Sequence
  Description of Artificial Sequence: Synthetic oligonucleotide
tggccatttgtaatgctgact

SEQ ID NO: 647 - DNA, 21 bp, Artificial Sequence
  Description of Artificial Sequence: Synthetic oligonucleotide
tggcacatctccccatccttc

SEQ ID NO: 648 - DNA, 21 bp, Artificial Sequence
  Description of Artificial Sequence: Synthetic oligonucleotide
catctccccatccttcaagga

SEQ ID NO: 649 - DNA, 21 bp, Artificial Sequence
  Description of Artificial Sequence: Synthetic oligonucleotide
ccactcgatccttgaaggatg

SEQ ID NO: 650 - DNA, 21 bp, Artificial Sequence
  Description of Artificial Sequence: Synthetic oligonucleotide
ggccactcgatccttgaagga

SEQ ID NO: 651 - DNA, 21 bp, Artificial Sequence
  Description of Artificial Sequence: Synthetic oligonucleotide
cctggggccactcgatccttg

SEQ ID NO: 652 - DNA, 21 bp, Artificial Sequence
  Description of Artificial Sequence: Synthetic oligonucleotide
gactggagggtgaggcccagg

SEQ ID NO: 653 - DNA, 21 bp, Artificial Sequence
  Description of Artificial Sequence: Synthetic oligonucleotide
atcgttcacggtcagcgactg

SEQ ID NO: 654 - DNA, 21 bp, Artificial Sequence
  Description of Artificial Sequence: Synthetic oligonucleotide
gtcgctgaccgtgaacgatac

SEQ ID NO: 655 - DNA, 21 bp, Artificial Sequence
  Description of Artificial Sequence: Synthetic oligonucleotide
cgctgaccgtgaacgatacag

SEQ ID NO: 656 - DNA, 21 bp, Artificial Sequence
  Description of Artificial Sequence: Synthetic oligonucleotide
gcatctatcacacctaccctg

SEQ ID NO: 657 - DNA, 21 bp, Artificial Sequence
  Description of Artificial Sequence: Synthetic oligonucleotide
cctaccctgatgggacgtaca

SEQ ID NO: 658 - DNA, 21 bp, Artificial Sequence
  Description of Artificial Sequence: Synthetic oligonucleotide
taccctgatgggacgtacact

SEQ ID NO: 659 - DNA, 21 bp, Artificial Sequence
  Description of Artificial Sequence: Synthetic oligonucleotide
ccctgatgggacgtacactgg

SEQ ID NO: 660 - DNA, 21 bp, Artificial Sequence
  Description of Artificial Sequence: Synthetic oligonucleotide
ttctcccagtgtacgtcccat

SEQ ID NO: 661 - DNA, 21 bp, Artificial Sequence
  Description of Artificial Sequence: Synthetic oligonucleotide
ggagaatcttcctggaggtcc

SEQ ID NO: 662 - DNA, 21 bp, Artificial Sequence
  Description of Artificial Sequence: Synthetic oligonucleotide
catggctccaagcaatggaat

SEQ ID NO: 663 - DNA, 21 bp, Artificial Sequence
  Description of Artificial Sequence: Synthetic oligonucleotide
cgcggccatggctccaagcaa

SEQ ID NO: 664 - DNA, 21 bp, Artificial Sequence
  Description of Artificial Sequence: Synthetic oligonucleotide
tcgcggccatggctccaagca

SEQ ID NO: 665 - DNA, 21 bp, Artificial Sequence
  Description of Artificial Sequence: Synthetic oligonucleotide
catcgtggtggtcgcgttgac

SEQ ID NO: 666 - DNA, 21 bp, Artificial Sequence
  Description of Artificial Sequence: Synthetic oligonucleotide
aaagccctcagaatccattct

SEQ ID NO: 667 - DNA, 21 bp, Artificial Sequence
  Description of Artificial Sequence: Synthetic oligonucleotide
cattctgtggaaggtgacctc

SEQ ID NO: 668 - DNA, 21 bp, Artificial Sequence
  Description of Artificial Sequence: Synthetic oligonucleotide
ttctgtggaaggtgacctcag

SEQ ID NO: 669 - DNA, 21 bp, Artificial Sequence
  Description of Artificial Sequence: Synthetic oligonucleotide
cctgaggtcaccttccacaga

SEQ ID NO: 670 - DNA, 21 bp, Artificial Sequence
  Description of Artificial Sequence: Synthetic oligonucleotide
ttctcctgaggtcaccttcca

SEQ ID NO: 671 - DNA, 21 bp, Artificial Sequence
  Description of Artificial Sequence: Synthetic oligonucleotide
aggagaaaatcagctggacag

SEQ ID NO: 672 - DNA, 21 bp, Artificial Sequence
  Description of Artificial Sequence: Synthetic oligonucleotide
ggagaaaatcagctggacagg

SEQ ID NO: 673 - DNA, 21 bp, Artificial Sequence
  Description of Artificial Sequence: Synthetic oligonucleotide
gccccagtgctccctcacccc

SEQ ID NO: 674 - DNA, 21 bp, Artificial Sequence
  Description of Artificial Sequence: Synthetic oligonucleotide
tggacacagcttcctgggggt

SEQ ID NO: 675 - DNA, 21 bp, Artificial Sequence
  Description of Artificial Sequence: Synthetic oligonucleotide
tctgcctggacacagcttcct

SEQ ID NO: 676 - DNA, 21 bp, Artificial Sequence
  Description of Artificial Sequence: Synthetic oligonucleotide
agctgcacctgctgggctctg

SEQ ID NO: 677 - DNA, 21 bp, Artificial Sequence
  Description of Artificial Sequence: Synthetic oligonucleotide
gctgggctctgtggagagcag

SEQ ID NO: 678 - DNA, 21 bp, Artificial Sequence
  Description of Artificial Sequence: Synthetic oligonucleotide
tgggctctgtggagagcagcg

SEQ ID NO: 679 - DNA, 21 bp, Artificial Sequence
  Description of Artificial Sequence: Synthetic oligonucleotide
ctgcatgactacttcaatgtc

SEQ ID NO: 680 - DNA, 21 bp, Artificial Sequence
  Description of Artificial Sequence: Synthetic oligonucleotide
aatgtcctgagttacagaagc

SEQ ID NO: 681 - DNA, 21 bp, Artificial Sequence
  Description of Artificial Sequence: Synthetic oligonucleotide
tgggtaactgcagcttcttca

SEQ ID NO: 682 - DNA, 20 bp, Artificial Sequence
  Description of Artificial Sequence: Synthetic oligonucleotide
gacaggcacaatagaaacaa

SEQ ID NO: 683 - DNA, 20 bp, Artificial Sequence
  Description of Artificial Sequence: Synthetic oligonucleotide
acaggcacaatagaaacaac

SEQ ID NO: 684 - DNA, 20 bp, Artificial Sequence
  Description of Artificial Sequence: Synthetic oligonucleotide
caggcacaatagaaacaacg

SEQ ID NO: 685 - DNA, 20 bp, Artificial Sequence
  Description of Artificial Sequence: Synthetic oligonucleotide
gggaacatttctgcagagaa

SEQ ID NO: 686 - DNA, 20 bp, Artificial Sequence
  Description of Artificial Sequence: Synthetic oligonucleotide
aacatttctgcagagaaagg

SEQ ID NO: 687 - DNA, 20 bp, Artificial Sequence
  Description of Artificial Sequence: Synthetic oligonucleotide
atgtcacctctcctccacca

SEQ ID NO: 688 - DNA, 20 bp, Artificial Sequence
  Description of Artificial Sequence: Synthetic oligonucleotide
cttgtgccgtggtggaggag

SEQ ID NO: 689 - DNA, 20 bp, Artificial Sequence
  Description of Artificial Sequence: Synthetic oligonucleotide
ggtcacttgtgccgtggtgg

SEQ ID NO: 690 - DNA, 20 bp, Artificial Sequence
  Description of Artificial Sequence: Synthetic oligonucleotide
caccacggcacaagtgaccc

SEQ ID NO: 691 - DNA, 20 bp, Artificial Sequence
  Description of Artificial Sequence: Synthetic oligonucleotide
ctgggtcacttgtgccgtgg

SEQ ID NO: 692 - DNA, 20 bp, Artificial Sequence
  Description of Artificial Sequence: Synthetic oligonucleotide
gacctgggtcacttgtgccg

SEQ ID NO: 693 - DNA, 20 bp, Artificial Sequence
  Description of Artificial Sequence: Synthetic oligonucleotide
cacaagtgacccaggtcaac

SEQ ID NO: 694 - DNA, 20 bp, Artificial Sequence
  Description of Artificial Sequence: Synthetic oligonucleotide
acaagtgacccaggtcaact

SEQ ID NO: 695 - DNA, 20 bp, Artificial Sequence
  Description of Artificial Sequence: Synthetic oligonucleotide
ccaggtcaactgggagcagc

SEQ ID NO: 696 - DNA, 20 bp, Artificial Sequence
  Description of Artificial Sequence: Synthetic oligonucleotide
ctgctgctcccagttgacct

SEQ ID NO: 697 - DNA, 20 bp, Artificial Sequence
  Description of Artificial Sequence: Synthetic oligonucleotide
cctgctgctcccagttgacc

SEQ ID NO: 698 - DNA, 20 bp, Artificial Sequence
  Description of Artificial Sequence: Synthetic oligonucleotide
ggagcagcaggaccagcttc

SEQ ID NO: 699 - DNA, 20 bp, Artificial Sequence
  Description of Artificial Sequence: Synthetic oligonucleotide
cattacaaatggccagaagc

SEQ ID NO: 700 - DNA, 20 bp, Artificial Sequence
  Description of Artificial Sequence: Synthetic oligonucleotide
ggccatttgtaatgctgact

SEQ ID NO: 701 - DNA, 20 bp, Artificial Sequence
  Description of Artificial Sequence: Synthetic oligonucleotide
gccatttgtaatgctgactt

SEQ ID NO: 702 - DNA, 20 bp, Artificial Sequence
  Description of Artificial Sequence: Synthetic oligonucleotide
ccatttgtaatgctgacttg

SEQ ID NO: 703 - DNA, 20 bp, Artificial Sequence
  Description of Artificial Sequence: Synthetic oligonucleotide
tttgtaatgctgacttgggg

SEQ ID NO: 704 - DNA, 20 bp, Artificial Sequence
  Description of Artificial Sequence: Synthetic oligonucleotide
ccccaagtcagcattacaaa

SEQ ID NO: 705 - DNA, 20 bp, Artificial Sequence
  Description of Artificial Sequence: Synthetic oligonucleotide
gcacatctccccatccttca

SEQ ID NO: 706 - DNA, 20 bp, Artificial Sequence
  Description of Artificial Sequence: Synthetic oligonucleotide
cccatccttcaaggatcgag

SEQ ID NO: 707 - DNA, 20 bp, Artificial Sequence
  Description of Artificial Sequence: Synthetic oligonucleotide
cactcgatccttgaaggatg

SEQ ID NO: 708 - DNA, 20 bp, Artificial Sequence
  Description of Artificial Sequence: Synthetic oligonucleotide
ccactcgatccttgaaggat

SEQ ID NO: 709 - DNA, 20 bp, Artificial Sequence
  Description of Artificial Sequence: Synthetic oligonucleotide
gccactcgatccttgaagga

SEQ ID NO: 710 - DNA, 20 bp, Artificial Sequence
  Description of Artificial Sequence: Synthetic oligonucleotide
ttcaaggatcgagtggcccc

SEQ ID NO: 711 - DNA, 20 bp, Artificial Sequence
  Description of Artificial Sequence: Synthetic oligonucleotide
tggggccactcgatccttga

SEQ ID NO: 712 - DNA, 20 bp, Artificial Sequence
  Description of Artificial Sequence: Synthetic oligonucleotide
gatcgagtggccccaggtcc

SEQ ID NO: 713 - DNA, 20 bp, Artificial Sequence
  Description of Artificial Sequence: Synthetic oligonucleotide
agtggccccaggtcccggcc

SEQ ID NO: 714 - DNA, 20 bp, Artificial Sequence
  Description of Artificial Sequence: Synthetic oligonucleotide
gtggccccaggtcccggcct

SEQ ID NO: 715 - DNA, 20 bp, Artificial Sequence
  Description of Artificial Sequence: Synthetic oligonucleotide
gaggcccaggccgggacctg

SEQ ID NO: 716 - DNA, 20 bp, Artificial Sequence
  Description of Artificial Sequence: Synthetic oligonucleotide
tgaggcccaggccgggacct

SEQ ID NO: 717 - DNA, 20 bp, Artificial Sequence
  Description of Artificial Sequence: Synthetic oligonucleotide
gtgaggcccaggccgggacc

SEQ ID NO: 718 - DNA, 20 bp, Artificial Sequence
  Description of Artificial Sequence: Synthetic oligonucleotide
tggagggtgaggcccaggcc

SEQ ID NO: 719 - DNA, 20 bp, Artificial Sequence
  Description of Artificial Sequence: Synthetic oligonucleotide
ctggagggtgaggcccaggc

SEQ ID NO: 720 - DNA, 20 bp, Artificial Sequence
  Description of Artificial Sequence: Synthetic oligonucleotide
gcgactggagggtgaggccc

SEQ ID NO: 721 - DNA, 20 bp, Artificial Sequence
  Description of Artificial Sequence: Synthetic oligonucleotide
cggtcagcgactggagggtg

SEQ ID NO: 722 - DNA, 20 bp, Artificial Sequence
  Description of Artificial Sequence: Synthetic oligonucleotide
gttcacggtcagcgactgga

SEQ ID NO: 723 - DNA, 20 bp, Artificial Sequence
  Description of Artificial Sequence: Synthetic oligonucleotide
cgttcacggtcagcgactgg

SEQ ID NO: 724 - DNA, 20 bp, Artificial Sequence
  Description of Artificial Sequence: Synthetic oligonucleotide
tatcgttcacggtcagcgac

SEQ ID NO: 725 - DNA, 20 bp, Artificial Sequence
  Description of Artificial Sequence: Synthetic oligonucleotide
tcgctgaccgtgaacgatac

SEQ ID NO: 726 - DNA, 20 bp, Artificial Sequence
  Description of Artificial Sequence: Synthetic oligonucleotide
cgctgaccgtgaacgataca

SEQ ID NO: 727 - DNA, 20 bp, Artificial Sequence
  Description of Artificial Sequence: Synthetic oligonucleotide
gctgaccgtgaacgatacag

SEQ ID NO: 728 - DNA, 20 bp, Artificial Sequence
  Description of Artificial Sequence: Synthetic oligonucleotide
gtactcccctgtatcgttca

SEQ ID NO: 729 - DNA, 20 bp, Artificial Sequence
  Description of Artificial Sequence: Synthetic oligonucleotide
atctatcacacctaccctga

SEQ ID NO: 730 - DNA, 20 bp, Artificial Sequence
  Description of Artificial Sequence: Synthetic oligonucleotide
tctatcacacctaccctgat

SEQ ID NO: 731 - DNA, 20 bp, Artificial Sequence
  Description of Artificial Sequence: Synthetic oligonucleotide
taccctgatgggacgtacac

SEQ ID NO: 732 - DNA, 20 bp, Artificial Sequence
  Description of Artificial Sequence: Synthetic oligonucleotide
accctgatgggacgtacact

SEQ ID NO: 733 - DNA, 20 bp, Artificial Sequence
  Description of Artificial Sequence: Synthetic oligonucleotide
agtgtacgtcccatcagggt

SEQ ID NO: 734 - DNA, 20 bp, Artificial Sequence
  Description of Artificial Sequence: Synthetic oligonucleotide
tcccagtgtacgtcccatca

SEQ ID NO: 735 - DNA, 20 bp, Artificial Sequence
  Description of Artificial Sequence: Synthetic oligonucleotide
ctcccagtgtacgtcccatc

SEQ ID NO: 736 - DNA, 20 bp, Artificial Sequence
  Description of Artificial Sequence: Synthetic oligonucleotide
gtacactgggagaatcttcc

SEQ ID NO: 737 - DNA, 20 bp, Artificial Sequence
  Description of Artificial Sequence: Synthetic oligonucleotide
cactgggagaatcttcctgg

SEQ ID NO: 738 - DNA, 20 bp, Artificial Sequence
  Description of Artificial Sequence: Synthetic oligonucleotide
ctgagctttctaggacctcc

SEQ ID NO: 739 - DNA, 20 bp, Artificial Sequence
  Description of Artificial Sequence: Synthetic oligonucleotide
aggttccagattccattgct

SEQ ID NO: 740 - DNA, 20 bp, Artificial Sequence
  Description of Artificial Sequence: Synthetic oligonucleotide
aagcaatggaatctggaacc

SEQ ID NO: 741 - DNA, 20 bp, Artificial Sequence
  Description of Artificial Sequence: Synthetic oligonucleotide
gattccattgcttggagcca

SEQ ID NO: 742 - DNA, 20 bp, Artificial Sequence
  Description of Artificial Sequence: Synthetic oligonucleotide
tggctccaagcaatggaatc

SEQ ID NO: 743 - DNA, 20 bp, Artificial Sequence
  Description of Artificial Sequence: Synthetic oligonucleotide
gcggccatggctccaagcaa

SEQ ID NO: 744 - DNA, 20 bp, Artificial Sequence
  Description of Artificial Sequence: Synthetic oligonucleotide
tggagccatggccgcgacgc

SEQ ID NO: 745 - DNA, 20 bp, Artificial Sequence
  Description of Artificial Sequence: Synthetic oligonucleotide
agccatggccgcgacgctgg

SEQ ID NO: 746 - DNA, 20 bp, Artificial Sequence
  Description of Artificial Sequence: Synthetic oligonucleotide
gaccaccagcgtcgcggcca

SEQ ID NO: 747 - DNA, 20 bp, Artificial Sequence
  Description of Artificial Sequence: Synthetic oligonucleotide
gcagatgaccaccagcgtcg

SEQ ID NO: 748 - DNA, 20 bp, Artificial Sequence
  Description of Artificial Sequence: Synthetic oligonucleotide
catctgcacagcagtcatcg

SEQ ID NO: 749 - DNA, 20 bp, Artificial Sequence
  Description of Artificial Sequence: Synthetic oligonucleotide
ctgcacagcagtcatcgtgg

SEQ ID NO: 750 - DNA, 20 bp, Artificial Sequence
  Description of Artificial Sequence: Synthetic oligonucleotide
agccctcagaatccattctg

SEQ ID NO: 751 - DNA, 20 bp, Artificial Sequence
  Description of Artificial Sequence: Synthetic oligonucleotide
ctcagaatccattctgtgga

SEQ ID NO: 752 - DNA, 20 bp, Artificial Sequence
  Description of Artificial Sequence: Synthetic oligonucleotide
ttccacagaatggattctga

SEQ ID NO: 753 - DNA, 20 bp, Artificial Sequence
  Description of Artificial Sequence: Synthetic oligonucleotide
cttccacagaatggattctg

SEQ ID NO: 754 - DNA, 20 bp, Artificial Sequence
  Description of Artificial Sequence: Synthetic oligonucleotide
attctgtggaaggtgacctc

SEQ ID NO: 755 - DNA, 20 bp, Artificial Sequence
  Description of Artificial Sequence: Synthetic oligonucleotide
tgaggtcaccttccacagaa

SEQ ID NO: 756 - DNA, 20 bp, Artificial Sequence
  Description of Artificial Sequence: Synthetic oligonucleotide
gacctcaggagaaaatcagc

SEQ ID NO: 757 - DNA, 20 bp, Artificial Sequence
  Description of Artificial Sequence: Synthetic oligonucleotide
caggagaaaatcagctggac

SEQ ID NO: 758 - DNA, 20 bp, Artificial Sequence
  Description of Artificial Sequence: Synthetic oligonucleotide
gtccagctgattttctcctg

SEQ ID NO: 759 - DNA, 20 bp, Artificial Sequence
  Description of Artificial Sequence: Synthetic oligonucleotide
gagaaaatcagctggacagg

SEQ ID NO: 760 - DNA, 20 bp, Artificial Sequence
  Description of Artificial Sequence: Synthetic oligonucleotide
aatcagctggacaggaggaa

SEQ ID NO: 761 - DNA, 20 bp, Artificial Sequence
  Description of Artificial Sequence: Synthetic oligonucleotide
cccagtgctccctcaccccc

SEQ ID NO: 762 - DNA, 20 bp, Artificial Sequence
  Description of Artificial Sequence: Synthetic oligonucleotide
ctgggggtgagggagcactg

SEQ ID NO: 763 - DNA, 20 bp, Artificial Sequence
  Description of Artificial Sequence: Synthetic oligonucleotide
cctgggggtgagggagcact

SEQ ID NO: 764 - DNA, 20 bp, Artificial Sequence
  Description of Artificial Sequence: Synthetic oligonucleotide
tcctgggggtgagggagcac

SEQ ID NO: 765 - DNA, 20 bp, Artificial Sequence
  Description of Artificial Sequence: Synthetic oligonucleotide
acacagcttcctgggggtga

SEQ ID NO: 766 - DNA, 20 bp, Artificial Sequence
  Description of Artificial Sequence: Synthetic oligonucleotide
gacacagcttcctgggggtg

SEQ ID NO: 767 - DNA, 20 bp, Artificial Sequence
  Description of Artificial Sequence: Synthetic oligonucleotide
acccccaggaagctgtgtcc

SEQ ID NO: 768 - DNA, 20 bp, Artificial Sequence
  Description of Artificial Sequence: Synthetic oligonucleotide
gcctggacacagcttcctgg

SEQ ID NO: 769 - DNA, 20 bp, Artificial Sequence
  Description of Artificial Sequence: Synthetic oligonucleotide
tgcctggacacagcttcctg

SEQ ID NO: 770 - DNA, 20 bp, Artificial Sequence
  Description of Artificial Sequence: Synthetic oligonucleotide
ctgcctggacacagcttcct

SEQ ID NO: 771 - DNA, 20 bp, Artificial Sequence
  Description of Artificial Sequence: Synthetic oligonucleotide
tctgcctggacacagcttcc

SEQ ID NO: 772 - DNA, 20 bp, Artificial Sequence
  Description of Artificial Sequence: Synthetic oligonucleotide
caggcagaagctgcacctgc

SEQ ID NO: 773 - DNA, 20 bp, Artificial Sequence
  Description of Artificial Sequence: Synthetic oligonucleotide
aggcagaagctgcacctgct

SEQ ID NO: 774 - DNA, 20 bp, Artificial Sequence
  Description of Artificial Sequence: Synthetic oligonucleotide
cagcaggtgcagcttctgcc

SEQ ID NO: 775 - DNA, 20 bp, Artificial Sequence
  Description of Artificial Sequence: Synthetic oligonucleotide
gctgcacctgctgggctctg

SEQ ID NO: 776 - DNA, 20 bp, Artificial Sequence
  Description of Artificial Sequence: Synthetic oligonucleotide
tgctctccacagagcccagc

SEQ ID NO: 777 - DNA, 20 bp, Artificial Sequence
  Description of Artificial Sequence: Synthetic oligonucleotide
ctgggctctgtggagagcag

SEQ ID NO: 778 - DNA, 20 bp, Artificial Sequence
  Description of Artificial Sequence: Synthetic oligonucleotide
tgggctctgtggagagcagc

SEQ ID NO: 779 - DNA, 20 bp, Artificial Sequence
  Description of Artificial Sequence: Synthetic oligonucleotide
gggctctgtggagagcagcg

SEQ ID NO: 780 - DNA, 20 bp, Artificial Sequence
  Description of Artificial Sequence: Synthetic oligonucleotide
ctgtggagagcagcggggag

SEQ ID NO: 781 - DNA, 20 bp, Artificial Sequence
  Description of Artificial Sequence: Synthetic oligonucleotide
attgaagtagtcatgcagct

SEQ ID NO: 782 - DNA, 20 bp, Artificial Sequence
  Description of Artificial Sequence: Synthetic oligonucleotide
tgtcctgagttacagaagcc

SEQ ID NO: 783 - DNA, 20 bp, Artificial Sequence
  Description of Artificial Sequence: Synthetic oligonucleotide
gtcctgagttacagaagcct

SEQ ID NO: 784 - DNA, 20 bp, Artificial Sequence
  Description of Artificial Sequence: Synthetic oligonucleotide
tacccaggcttctgtaactc

SEQ ID NO: 785 - DNA, 20 bp, Artificial Sequence
  Description of Artificial Sequence: Synthetic oligonucleotide
tgaagaagctgcagttaccc

SEQ ID NO: 786 - DNA, 20 bp, Artificial Sequence
  Description of Artificial Sequence: Synthetic oligonucleotide
tgcagcttcttcacagagac

SEQ ID NO: 787 - DNA, 20 bp, Artificial Sequence
  Description of Artificial Sequence: Synthetic oligonucleotide
gttgtttctattgtgcctgt

SEQ ID NO: 788 - DNA, 20 bp, Artificial Sequence
  Description of Artificial Sequence: Synthetic oligonucleotide
cgttgtttctattgtgcctg

SEQ ID NO: 789 - DNA, 20 bp, Artificial Sequence
  Description of Artificial Sequence: Synthetic oligonucleotide
ccgttgtttctattgtgcct

SEQ ID NO: 790 - DNA, 20 bp, Artificial Sequence
  Description of Artificial Sequence: Synthetic oligonucleotide
ccacggcacaagtgacccag

SEQ ID NO: 791 - DNA, 20 bp, Artificial Sequence
  Description of Artificial Sequence: Synthetic oligonucleotide
agttgacctgggtcacttgt

SEQ ID NO: 792 - DNA, 20 bp, Artificial Sequence
  Description of Artificial Sequence: Synthetic oligonucleotide
aagtcagcattacaaatggc

SEQ ID NO: 793 - DNA, 20 bp, Artificial Sequence
  Description of Artificial Sequence: Synthetic oligonucleotide
catccttcaaggatcgagtg

SEQ ID NO: 794 - DNA, 20 bp, Artificial Sequence
  Description of Artificial Sequence: Synthetic oligonucleotide
atccttcaaggatcgagtgg

SEQ ID NO: 795 - DNA, 20 bp, Artificial Sequence
  Description of Artificial Sequence: Synthetic oligonucleotide
aggatcgagtggccccaggt

SEQ ID NO: 796 - DNA, 20 bp, Artificial Sequence
  Description of Artificial Sequence: Synthetic oligonucleotide
aggtcccggcctgggcctca

SEQ ID NO: 797 - DNA, 20 bp, Artificial Sequence
  Description of Artificial Sequence: Synthetic oligonucleotide
ggcctgggcctcaccctcca

SEQ ID NO: 798 - DNA, 20 bp, Artificial Sequence
  Description of Artificial Sequence: Synthetic oligonucleotide
cggtcagcgactggagggtg

SEQ ID NO: 799 - DNA, 20 bp, Artificial Sequence
  Description of Artificial Sequence: Synthetic oligonucleotide
gtcgctgaccgtgaacgata

SEQ ID NO: 800 - DNA, 20 bp, Artificial Sequence
  Description of Artificial Sequence: Synthetic oligonucleotide
tgtatcgttcacggtcagcg

SEQ ID NO: 801 - DNA, 20 bp, Artificial Sequence
  Description of Artificial Sequence: Synthetic oligonucleotide
ctgtatcgttcacggtcagc

SEQ ID NO: 802 - DNA, 20 bp, Artificial Sequence
  Description of Artificial Sequence: Synthetic oligonucleotide
atcagggtaggtgtgataga

SEQ ID NO: 803 - DNA, 20 bp, Artificial Sequence
  Description of Artificial Sequence: Synthetic oligonucleotide
agtgtacgtcccatcagggt

SEQ ID NO: 804 - DNA, 20 bp, Artificial Sequence
  Description of Artificial Sequence: Synthetic oligonucleotide
ggaagattctcccagtgtac

SEQ ID NO: 805 - DNA, 20 bp, Artificial Sequence
  Description of Artificial Sequence: Synthetic oligonucleotide
tggaggtcctagaaagctca

SEQ ID NO: 806 - DNA, 20 bp, Artificial Sequence
  Description of Artificial Sequence: Synthetic oligonucleotide
agcaatggaatctggaacct

SEQ ID NO: 807 - DNA, 20 bp, Artificial Sequence
  Description of Artificial Sequence: Synthetic oligonucleotide
agattccattgcttggagcc

SEQ ID NO: 808 - DNA, 20 bp, Artificial Sequence
  Description of Artificial Sequence: Synthetic oligonucleotide
gattccattgcttggagcca

SEQ ID NO: 809 - DNA, 20 bp, Artificial Sequence
  Description of Artificial Sequence: Synthetic oligonucleotide
attgcttggagccatggccg

SEQ ID NO: 810 - DNA, 20 bp, Artificial Sequence
  Description of Artificial Sequence: Synthetic oligonucleotide
ttgcttggagccatggccgc

SEQ ID NO: 811 - DNA, 20 bp, Artificial Sequence
  Description of Artificial Sequence: Synthetic oligonucleotide
cagaatggattctgagggct

SEQ ID NO: 812 - DNA, 20 bp, Artificial Sequence
  Description of Artificial Sequence: Synthetic oligonucleotide
acagaatggattctgagggc

SEQ ID NO: 813 - DNA, 20 bp, Artificial Sequence
  Description of Artificial Sequence: Synthetic oligonucleotide
ttctgtggaaggtgacctca

SEQ ID NO: 814 - DNA, 20 bp, Artificial Sequence
  Description of Artificial Sequence: Synthetic oligonucleotide
gctgattttctcctgaggtc

SEQ ID NO: 815 - DNA, 20 bp, Artificial Sequence
  Description of Artificial Sequence: Synthetic oligonucleotide
tcctgtccagctgattttct

SEQ ID NO: 816 - DNA, 20 bp, Artificial Sequence
  Description of Artificial Sequence: Synthetic oligonucleotide
ttcctcctgtccagctgatt

SEQ ID NO: 817 - DNA, 20 bp, Artificial Sequence
  Description of Artificial Sequence: Synthetic oligonucleotide
tgggggtgagggagcactgg

SEQ ID NO: 818 - DNA, 20 bp, Artificial Sequence
  Description of Artificial Sequence: Synthetic oligonucleotide
agtgctccctcacccccagg

SEQ ID NO: 819 - DNA, 20 bp, Artificial Sequence
  Description of Artificial Sequence: Synthetic oligonucleotide
tcacccccaggaagctgtgt

SEQ ID NO: 820 - DNA, 20 bp, Artificial Sequence
  Description of Artificial Sequence: Synthetic oligonucleotide
caggaagctgtgtccaggca

SEQ ID NO: 821 - DNA, 20 bp, Artificial Sequence
  Description of Artificial Sequence: Synthetic oligonucleotide
aggaagctgtgtccaggcag

SEQ ID NO: 822 - DNA, 20 bp, Artificial Sequence
  Description of Artificial Sequence: Synthetic oligonucleotide
ggcagaagctgcacctgctg

SEQ ID NO: 823 - DNA, 20 bp, Artificial Sequence
  Description of Artificial Sequence: Synthetic oligonucleotide
cagagcccagcaggtgcagc

SEQ ID NO: 824 - DNA, 20 bp, Artificial Sequence
  Description of Artificial Sequence: Synthetic oligonucleotide
gctgctctccacagagccca

SEQ ID NO: 825 - DNA, 20 bp, Artificial Sequence
  Description of Artificial Sequence: Synthetic oligonucleotide
cgctgctctccacagagccc

SEQ ID NO: 826 - DNA, 20 bp, Artificial Sequence
  Description of Artificial Sequence: Synthetic oligonucleotide
atgtcctgagttacagaagc

SEQ ID NO: 827 - DNA, 20 bp, Artificial Sequence
  Description of Artificial Sequence: Synthetic oligonucleotide
gagcacacccactgcgatgt

SEQ ID NO: 828 - DNA, 20 bp, Artificial Sequence
  Description of Artificial Sequence: Synthetic oligonucleotide
gatggccaggagactgaaga

SEQ ID NO: 829 - DNA, 20 bp, Artificial Sequence
  Description of Artificial Sequence: Synthetic oligonucleotide
ctgctcaccggagcgggatg

SEQ ID NO: 830 - DNA, 20 bp, Artificial Sequence
  Description of Artificial Sequence: Synthetic oligonucleotide
gtctgtggccatgcccatca

SEQ ID NO: 831 - DNA, 20 bp, Artificial Sequence
  Description of Artificial Sequence: Synthetic oligonucleotide
tcaccggagcgggatgcgga

SEQ ID NO: 832 - DNA, 20 bp, Artificial Sequence
  Description of Artificial Sequence: Synthetic oligonucleotide
gtggcaggcagcgcagaacc

SEQ ID NO: 833 - DNA, 20 bp, Artificial Sequence
  Description of Artificial Sequence: Synthetic oligonucleotide
agcacaccagcacattgccc

SEQ ID NO: 834 - DNA, 20 bp, Artificial Sequence
  Description of Artificial Sequence: Synthetic oligonucleotide
caggttgctgttgagccaca

SEQ ID NO: 835 - DNA, 20 bp, Artificial Sequence
  Description of Artificial Sequence: Synthetic oligonucleotide
cttcattgcctgcttcgtcc

SEQ ID NO: 836 - DNA, 20 bp, Artificial Sequence
  Description of Artificial Sequence: Synthetic oligonucleotide
gtacaccgaggagcccatga

SEQ ID NO: 837 - DNA, 20 bp, Artificial Sequence
  Description of Artificial Sequence: Synthetic oligonucleotide
gatggcaatgtagcggtcaa

SEQ ID NO: 838 - DNA, 20 bp, Artificial Sequence
  Description of Artificial Sequence: Synthetic oligonucleotide
ctcctcggtgtacatcacgg

SEQ ID NO: 839 - DNA, 20 bp, Artificial Sequence
  Description of Artificial Sequence: Synthetic oligonucleotide
cgaggagcccatgatgggca

SEQ ID NO: 840 - DNA, 20 bp, Artificial Sequence
  Description of Artificial Sequence: Synthetic oligonucleotide
gggctcctcggtgtacatca

SEQ ID NO: 841 - DNA, 20 bp, Artificial Sequence
  Description of Artificial Sequence: Synthetic oligonucleotide
ctttgtggtgtcactggcgg

SEQ ID NO: 842 - DNA, 20 bp, Artificial Sequence
  Description of Artificial Sequence: Synthetic oligonucleotide
ccgctccggtgagcagggcc

SEQ ID NO: 843 - DNA, 20 bp, Artificial Sequence
  Description of Artificial Sequence: Synthetic oligonucleotide
gggttctgcgctgcctgcca

SEQ ID NO: 844 - DNA, 20 bp, Artificial Sequence
  Description of Artificial Sequence: Synthetic oligonucleotide
ggacgaagcaggcaatgaag

SEQ ID NO: 845 - DNA, 20 bp, Artificial Sequence
  Description of Artificial Sequence: Synthetic oligonucleotide
gtgctgatggtgatggcaaa

SEQ ID NO: 846 - DNA, 20 bp, Artificial Sequence
  Description of Artificial Sequence: Synthetic oligonucleotide
agcgcagaacccggtgctga

SEQ ID NO: 847 - DNA, 20 bp, Artificial Sequence
  Description of Artificial Sequence: Synthetic oligonucleotide
gagctccatcttcagtctcc

SEQ ID NO: 848 - DNA, 20 bp, Artificial Sequence
  Description of Artificial Sequence: Synthetic oligonucleotide
tgctgatggtgatggcaaag

SEQ ID NO: 849 - DNA, 20 bp, Artificial Sequence
  Description of Artificial Sequence: Synthetic oligonucleotide
ggcggcggccgacatcgcag

SEQ ID NO: 850 - DNA, 20 bp, Artificial Sequence
  Description of Artificial Sequence: Synthetic oligonucleotide
aatgaagaggcagccgtggc

SEQ ID NO: 851 - DNA, 20 bp, Artificial Sequence
  Description of Artificial Sequence: Synthetic oligonucleotide
gggcaatgtgctggtgtgct

SEQ ID NO: 852 - DNA, 20 bp, Artificial Sequence
  Description of Artificial Sequence: Synthetic oligonucleotide
catgcccatcatgggctcct

SEQ ID NO: 853 - DNA, 20 bp, Artificial Sequence
  Description of Artificial Sequence: Synthetic oligonucleotide
aatgtagcggtcaatggcga

SEQ ID NO: 854 - DNA, 20 bp, Artificial Sequence
  Description of Artificial Sequence: Synthetic oligonucleotide
agtagttggtgacgttctgc

SEQ ID NO: 855 - DNA, 20 bp, Artificial Sequence
  Description of Artificial Sequence: Synthetic oligonucleotide
agcggtcaatggcgatggcc

SEQ ID NO: 856 - DNA, 20 bp, Artificial Sequence
  Description of Artificial Sequence: Synthetic oligonucleotide
cgcatcccgctccggtgagc

SEQ ID NO: 857 - DNA, 20 bp, Artificial Sequence
  Description of Artificial Sequence: Synthetic oligonucleotide
gcatcccgctccggtgagca

SEQ ID NO: 858 - DNA, 20 bp, Artificial Sequence
  Description of Artificial Sequence: Synthetic oligonucleotide
tgggcaatgtgctggtgtgc

SEQ ID NO: 859 - DNA, 20 bp, Artificial Sequence
  Description of Artificial Sequence: Synthetic oligonucleotide
caactactttgtggtgtcac

SEQ ID NO: 860 - DNA, 20 bp, Artificial Sequence
  Description of Artificial Sequence: Synthetic oligonucleotide
cgctccggtgagcagggccg

SEQ ID NO: 861 - DNA, 20 bp, Artificial Sequence
  Description of Artificial Sequence: Synthetic oligonucleotide
gatggtgatggcaaagggga

SEQ ID NO: 862 - DNA, 20 bp, Artificial Sequence
  Description of Artificial Sequence: Synthetic oligonucleotide
ggtgtacatcacggtggagc

SEQ ID NO: 863 - DNA, 20 bp, Artificial Sequence
  Description of Artificial Sequence: Synthetic oligonucleotide
gaacgtcaccaactactttg

SEQ ID NO: 864 - DNA, 20 bp, Artificial Sequence
  Description of Artificial Sequence: Synthetic oligonucleotide
cagtgacaccacaaagtagt

SEQ ID NO: 865 - DNA, 20 bp, Artificial Sequence
  Description of Artificial Sequence: Synthetic oligonucleotide
ggccatcctgggcaatgtgc

SEQ ID NO: 866 - DNA, 20 bp, Artificial Sequence
  Description of Artificial Sequence: Synthetic oligonucleotide
cccggccctgctcaccggag

SEQ ID NO: 867 - DNA, 20 bp, Artificial Sequence
  Description of Artificial Sequence: Synthetic oligonucleotide
caccagcacattgcccagga

SEQ ID NO: 868 - DNA, 20 bp, Artificial Sequence
  Description of Artificial Sequence: Synthetic oligonucleotide
tttgccatcaccatcagcac

SEQ ID NO: 869 - DNA, 20 bp, Artificial Sequence
  Description of Artificial Sequence: Synthetic oligonucleotide
ctccaccgtgatgtacaccg

SEQ ID NO: 870 - DNA, 20 bp, Artificial Sequence
  Description of Artificial Sequence: Synthetic oligonucleotide
ggagctggccattgctgtgc

SEQ ID NO: 871 - DNA, 20 bp, Artificial Sequence
  Description of Artificial Sequence: Synthetic oligonucleotide
caggatggccagcacagcaa

SEQ ID NO: 872 - DNA, 20 bp, Artificial Sequence
  Description of Artificial Sequence: Synthetic oligonucleotide
gaacccggtgctgatggtga

SEQ ID NO: 873 - DNA, 20 bp, Artificial Sequence
  Description of Artificial Sequence: Synthetic oligonucleotide
tggagctctgcgtgaggacc

SEQ ID NO: 874 - DNA, 20 bp, Artificial Sequence
  Description of Artificial Sequence: Synthetic oligonucleotide
cccgctccggtgagcagggc

SEQ ID NO: 875 - DNA, 20 bp, Artificial Sequence
  Description of Artificial Sequence: Synthetic oligonucleotide
aggcaatgaagaggcagccg

SEQ ID NO: 876 - DNA, 20 bp, Artificial Sequence
  Description of Artificial Sequence: Synthetic oligonucleotide
ccggccctgctcaccggagc

SEQ ID NO: 877 - DNA, 20 bp, Artificial Sequence
  Description of Artificial Sequence: Synthetic oligonucleotide
gcggcggccgacatcgcagt

SEQ ID NO: 878 - DNA, 20 bp, Artificial Sequence
  Description of Artificial Sequence: Synthetic oligonucleotide
ggtgctgatggtgatggcaa

SEQ ID NO: 879 - DNA, 20 bp, Artificial Sequence
  Description of Artificial Sequence: Synthetic oligonucleotide
ctactttgtggtgtcactgg

SEQ ID NO: 880 - DNA, 20 bp, Artificial Sequence
  Description of Artificial Sequence: Synthetic oligonucleotide
tacaccgaggagcccatgat

SEQ ID NO: 881 - DNA, 20 bp, Artificial Sequence
  Description of Artificial Sequence: Synthetic oligonucleotide
tctgtggccatgcccatcat

SEQ ID NO: 882 - DNA, 20 bp, Artificial Sequence
  Description of Artificial Sequence: Synthetic oligonucleotide
attgctgtgctggccatcct

SEQ ID NO: 883 - DNA, 20 bp, Artificial Sequence
  Description of Artificial Sequence: Synthetic oligonucleotide
cgtgaggaccaggacgaagc

SEQ ID NO: 884 - DNA, 20 bp, Artificial Sequence
  Description of Artificial Sequence: Synthetic oligonucleotide
ttgccatcaccatcagcacc

SEQ ID NO: 885 - DNA, 20 bp, Artificial Sequence
  Description of Artificial Sequence: Synthetic oligonucleotide
ggatgcggatggcaatgtag

SEQ ID NO: 886 - DNA, 20 bp, Artificial Sequence
  Description of Artificial Sequence: Synthetic oligonucleotide
ttgccatccgcatcccgctc

SEQ ID NO: 887 - DNA, 20 bp, Artificial Sequence
  Description of Artificial Sequence: Synthetic oligonucleotide
tgaagatggagctctgcgtg

SEQ ID NO: 888 - DNA, 20 bp, Artificial Sequence
  Description of Artificial Sequence: Synthetic oligonucleotide
cattgctgtgctggccatcc

SEQ ID NO: 889 - DNA, 20 bp, Artificial Sequence
  Description of Artificial Sequence: Synthetic oligonucleotide
tgctggtgtgctgggccgtg

SEQ ID NO: 890 - DNA, 21 bp, Artificial Sequence
  Description of Artificial Sequence: Synthetic oligonucleotide
ggctcctcggtgtacatcacg

SEQ ID NO: 891 - DNA, 21 bp, Artificial Sequence
  Description of Artificial Sequence: Synthetic oligonucleotide
gagctctgcgtgaggaccagg

SEQ ID NO: 892 - DNA, 21 bp, Artificial Sequence
  Description of Artificial Sequence: Synthetic oligonucleotide
gatggagctctgcgtgaggac

SEQ ID NO: 893 - DNA, 21 bp, Artificial Sequence
  Description of Artificial Sequence: Synthetic oligonucleotide
ccagcacaccagcacattgcc

SEQ ID NO: 894 - DNA, 21 bp, Artificial Sequence
  Description of Artificial Sequence: Synthetic oligonucleotide
aggaccaggacgaagcaggca

SEQ ID NO: 895 - DNA, 21 bp, Artificial Sequence
  Description of Artificial Sequence: Synthetic oligonucleotide
tgccatccgcatcccgctccg

SEQ ID NO: 896 - DNA, 21 bp, Artificial Sequence
  Description of Artificial Sequence: Synthetic oligonucleotide
gtgtggctcaacagcaacctg

SEQ ID NO: 897 - DNA, 21 bp, Artificial Sequence
  Description of Artificial Sequence: Synthetic oligonucleotide
agctccaccgtgatgtacacc

SEQ ID NO: 898 - DNA, 21 bp, Artificial Sequence
  Description of Artificial Sequence: Synthetic oligonucleotide
gtagcggtcaatggcgatggc

SEQ ID NO: 899 - DNA, 21 bp, Artificial Sequence
  Description of Artificial Sequence: Synthetic oligonucleotide
cggtgctgatggtgatggcaa

SEQ ID NO: 900 - DNA, 21 bp, Artificial Sequence
  Description of Artificial Sequence: Synthetic oligonucleotide
ccctgctcaccggagcgggat

SEQ ID NO: 901 - DNA, 21 bp, Artificial Sequence
  Description of Artificial Sequence: Synthetic oligonucleotide
gtgacgttctgcaggttgctg

SEQ ID NO: 902 - DNA, 21 bp, Artificial Sequence
  Description of Artificial Sequence: Synthetic oligonucleotide
gctccaccgtgatgtacaccg

SEQ ID NO: 903 - DNA, 21 bp, Artificial Sequence
  Description of Artificial Sequence: Synthetic oligonucleotide
actgaagatggagctctgcgt

SEQ ID NO: 904 - DNA, 21 bp, Artificial Sequence
  Description of Artificial Sequence: Synthetic oligonucleotide
ccagctccaccgtgatgtaca

SEQ ID NO: 905 - DNA, 21 bp, Artificial Sequence
  Description of Artificial Sequence: Synthetic oligonucleotide
cctttgccatcaccatcagca

SEQ ID NO: 906 - DNA, 21 bp, Artificial Sequence
  Description of Artificial Sequence: Synthetic oligonucleotide
ccggtgctgatggtgatggca

SEQ ID NO: 907 - DNA, 21 bp, Artificial Sequence
  Description of Artificial Sequence: Synthetic oligonucleotide
cctgggcaatgtgctggtgtg

SEQ ID NO: 908 - DNA, 21 bp, Artificial Sequence
  Description of Artificial Sequence: Synthetic oligonucleotide
aggcagccgtggcaggcagcg

SEQ ID NO: 909 - DNA, 21 bp, Artificial Sequence
  Description of Artificial Sequence: Synthetic oligonucleotide
gcgatggccaggagactgaag

SEQ ID NO: 910 - DNA, 21 bp, Artificial Sequence
  Description of Artificial Sequence: Synthetic oligonucleotide
cgatggccaggagactgaaga

SEQ ID NO: 911 - DNA, 21 bp, Artificial Sequence
  Description of Artificial Sequence: Synthetic oligonucleotide
tcccgctccggtgagcagggc

SEQ ID NO: 912 - DNA, 21 bp, Artificial Sequence
  Description of Artificial Sequence: Synthetic oligonucleotide
tgcttcgtcctggtcctcacg

SEQ ID NO: 913 - DNA, 21 bp, Artificial Sequence
  Description of Artificial Sequence: Synthetic oligonucleotide
accaggacgaagcaggcaatg

SEQ ID NO: 914 - DNA, 21 bp, Artificial Sequence
  Description of Artificial Sequence: Synthetic oligonucleotide
atgtacaccgaggagcccatg

SEQ ID NO: 915 - DNA, 21 bp, Artificial Sequence
  Description of Artificial Sequence: Synthetic oligonucleotide
tcgtctgtggccatgcccatc

SEQ ID NO: 916 - DNA, 21 bp, Artificial Sequence
  Description of Artificial Sequence: Synthetic oligonucleotide
tcaatggcgatggccaggaga

SEQ ID NO: 917 - DNA, 21 bp, Artificial Sequence
  Description of Artificial Sequence: Synthetic oligonucleotide
ggtgctgatggtgatggcaaa

SEQ ID NO: 918 - DNA, 21 bp, Artificial Sequence
  Description of Artificial Sequence: Synthetic oligonucleotide
tagcggtcaatggcgatggcc

SEQ ID NO: 919 - DNA, 21 bp, Artificial Sequence
  Description of Artificial Sequence: Synthetic oligonucleotide
tccgcatcccgctccggtgag

SEQ ID NO: 920 - DNA, 21 bp, Artificial Sequence
  Description of Artificial Sequence: Synthetic oligonucleotide
ctggcggcggccgacatcgca

SEQ ID NO: 921 - DNA, 21 bp, Artificial Sequence
  Description of Artificial Sequence: Synthetic oligonucleotide
gccattgctgtgctggccatc

SEQ ID NO: 922 - DNA, 21 bp, Artificial Sequence
  Description of Artificial Sequence: Synthetic oligonucleotide
atcccgctccggtgagcaggg

SEQ ID NO: 923 - DNA, 21 bp, Artificial Sequence
  Description of Artificial Sequence: Synthetic oligonucleotide
agactgaagatggagctctgc

SEQ ID NO: 924 - DNA, 21 bp, Artificial Sequence
  Description of Artificial Sequence: Synthetic oligonucleotide
ccccggccctgctcaccggag

SEQ ID NO: 925 - DNA, 21 bp, Artificial Sequence
  Description of Artificial Sequence: Synthetic oligonucleotide
atggtgatggcaaaggggatg

SEQ ID NO: 926 - DNA, 21 bp, Artificial Sequence
  Description of Artificial Sequence: Synthetic oligonucleotide
gctcctcggtgtacatcacgg

SEQ ID NO: 927 - DNA, 20 bp, Artificial Sequence
  Description of Artificial Sequence: Synthetic oligonucleotide
tgtcgatggcaatagccaag

SEQ ID NO: 928 - DNA, 20 bp, Artificial Sequence
  Description of Artificial Sequence: Synthetic oligonucleotide
agaagttggtgacgttctgc

SEQ ID NO: 929 - DNA, 20 bp, Artificial Sequence
  Description of Artificial Sequence: Synthetic oligonucleotide
ttcgccatcaccatcagcac

SEQ ID NO: 930 - DNA, 20 bp, Artificial Sequence
  Description of Artificial Sequence: Synthetic oligonucleotide
gaagaagaggcagccatggc

SEQ ID NO: 931 - DNA, 20 bp, Artificial Sequence
  Description of Artificial Sequence: Synthetic oligonucleotide
cacaagcacgttacccagga

SEQ ID NO: 932 - DNA, 20 bp, Artificial Sequence
  Description of Artificial Sequence: Synthetic oligonucleotide
caacttcttcgtggtatctc

SEQ ID NO: 933 - DNA, 20 bp, Artificial Sequence
  Description of Artificial Sequence: Synthetic oligonucleotide
caggatggccagcacagcaa

SEQ ID NO: 934 - DNA, 20 bp, Artificial Sequence
  Description of Artificial Sequence: Synthetic oligonucleotide
aattccactccggtgagcca

SEQ ID NO: 935 - DNA, 20 bp, Artificial Sequence
  Description of Artificial Sequence: Synthetic oligonucleotide
agcgcagaagccagtgctga

SEQ ID NO: 936 - DNA, 20 bp, Artificial Sequence
  Description of Artificial Sequence: Synthetic oligonucleotide
gtgctgatggtgatggcgaa

SEQ ID NO: 937 - DNA, 20 bp, Artificial Sequence
  Description of Artificial Sequence: Synthetic oligonucleotide
ggagctggccattgctgtgc

SEQ ID NO: 938 - DNA, 20 bp, Artificial Sequence
  Description of Artificial Sequence: Synthetic oligonucleotide
aatagccaagaggctgaaga

SEQ ID NO: 939 - DNA, 20 bp, Artificial Sequence
  Description of Artificial Sequence: Synthetic oligonucleotide
ctcctcggtgtacatcatgg

SEQ ID NO: 940 - DNA, 20 bp, Artificial Sequence
  Description of Artificial Sequence: Synthetic oligonucleotide
ggacaaagcaggcgaagaag

SEQ ID NO: 941 - DNA, 20 bp, Artificial Sequence
  Description of Artificial Sequence: Synthetic oligonucleotide
tctggcggcggctgacatcg

SEQ ID NO: 942 - DNA, 20 bp, Artificial Sequence
  Description of Artificial Sequence: Synthetic oligonucleotide
tgggtaacgtgcttgtgtgc

SEQ ID NO: 943 - DNA, 20 bp, Artificial Sequence
  Description of Artificial Sequence: Synthetic oligonucleotide
gatgtacaccgaggagccca

SEQ ID NO: 944 - DNA, 20 bp, Artificial Sequence
  Description of Artificial Sequence: Synthetic oligonucleotide
taacccctggctcaccggag

SEQ ID NO: 945 - DNA, 20 bp, Artificial Sequence
  Description of Artificial Sequence: Synthetic oligonucleotide
tcaccggagtggaattcgga

SEQ ID NO: 946 - DNA, 20 bp, Artificial Sequence
  Description of Artificial Sequence: Synthetic oligonucleotide
gcggcggctgacatcgcggt

SEQ ID NO: 947 - DNA, 20 bp, Artificial Sequence
  Description of Artificial Sequence: Synthetic oligonucleotide
gatggtgatggcgaatggga

SEQ ID NO: 948 - DNA, 20 bp, Artificial Sequence
  Description of Artificial Sequence: Synthetic oligonucleotide
ggcttctgcgctgcctgcca

SEQ ID NO: 949 - DNA, 20 bp, Artificial Sequence
  Description of Artificial Sequence: Synthetic oligonucleotide
attccactccggtgagccag

SEQ ID NO: 950 - DNA, 20 bp, Artificial Sequence
  Description of Artificial Sequence: Synthetic oligonucleotide
ggtgtacatcatggtggagc

SEQ ID NO: 951 - DNA, 20 bp, Artificial Sequence
  Description of Artificial Sequence: Synthetic oligonucleotide
attgctgtgctggccatcct

SEQ ID NO: 952 - DNA, 20 bp, Artificial Sequence
  Description of Artificial Sequence: Synthetic oligonucleotide
ctccaccatgatgtacaccg

SEQ ID NO: 953 - DNA, 20 bp, Artificial Sequence
  Description of Artificial Sequence: Synthetic oligonucleotide
ggcggcggctgacatcgcgg

SEQ ID NO: 954 - DNA, 20 bp, Artificial Sequence
  Description of Artificial Sequence: Synthetic oligonucleotide
tacaccgaggagcccatggc

SEQ ID NO: 955 - DNA, 20 bp, Artificial Sequence
  Description of Artificial Sequence: Synthetic oligonucleotide
gggtaacgtgcttgtgtgct

SEQ ID NO: 956 - DNA, 20 bp, Artificial Sequence
  Description of Artificial Sequence: Synthetic oligonucleotide
caggttgctgttgatccaca

SEQ ID NO: 957 - DNA, 20 bp, Artificial Sequence
  Description of Artificial Sequence: Synthetic oligonucleotide
tgaagatggaactctgcgtg

SEQ ID NO: 958 - DNA, 20 bp, Artificial Sequence
  Description of Artificial Sequence: Synthetic oligonucleotide
gatggcgatgtatctgtcga

SEQ ID NO: 959 - DNA, 20 bp, Artificial Sequence
  Description of Artificial Sequence: Synthetic oligonucleotide
cttcttcgcctgctttgtcc

SEQ ID NO: 960 - DNA, 20 bp, Artificial Sequence
  Description of Artificial Sequence: Synthetic oligonucleotide
aggcgaagaagaggcagcca

SEQ ID NO: 961 - DNA, 20 bp, Artificial Sequence
  Description of Artificial Sequence: Synthetic oligonucleotide
tgcttgtgtgctgggccgtg

SEQ ID NO: 962 - DNA, 20 bp, Artificial Sequence
  Description of Artificial Sequence: Synthetic oligonucleotide
gaagccagtgctgatggtga

SEQ ID NO: 963 - DNA, 20 bp, Artificial Sequence
  Description of Artificial Sequence: Synthetic oligonucleotide
cgtgaggaccaggacaaagc

SEQ ID NO: 964 - DNA, 20 bp, Artificial Sequence
  Description of Artificial Sequence: Synthetic oligonucleotide
tggaactctgcgtgaggacc

SEQ ID NO: 965 - DNA, 20 bp, Artificial Sequence
  Description of Artificial Sequence: Synthetic oligonucleotide
cattgctgtgctggccatcc

SEQ ID NO: 966 - DNA, 20 bp, Artificial Sequence
  Description of Artificial Sequence: Synthetic oligonucleotide
ttctcccgccatgggctcct

SEQ ID NO: 967 - DNA, 20 bp, Artificial Sequence
  Description of Artificial Sequence: Synthetic oligonucleotide
tggctcaccggagtggaatt

SEQ ID NO: 968 - DNA, 20 bp, Artificial Sequence
  Description of Artificial Sequence: Synthetic oligonucleotide
tgctgatggtgatggcgaat

SEQ ID NO: 969 - DNA, 20 bp, Artificial Sequence
  Description of Artificial Sequence: Synthetic oligonucleotide
cttcgtggtatctctggcgg

SEQ ID NO: 970 - DNA, 20 bp, Artificial Sequence
  Description of Artificial Sequence: Synthetic oligonucleotide
agcacacaagcacgttaccc

SEQ ID NO: 971 - DNA, 20 bp, Artificial Sequence
  Description of Artificial Sequence: Synthetic oligonucleotide
gggctcctcggtgtacatca

SEQ ID NO: 972 - DNA, 20 bp, Artificial Sequence
  Description of Artificial Sequence: Synthetic oligonucleotide
gtacaccgaggagcccatgg

SEQ ID NO: 973 - DNA, 20 bp, Artificial Sequence
  Description of Artificial Sequence: Synthetic oligonucleotide
gaacgtcaccaacttcttcg

SEQ ID NO: 974 - DNA, 20 bp, Artificial Sequence
  Description of Artificial Sequence: Synthetic oligonucleotide
tcgccatccgaattccactc

SEQ ID NO: 975 - DNA, 20 bp, Artificial Sequence
  Description of Artificial Sequence: Synthetic oligonucleotide
gagttccatcttcagcctct

SEQ ID NO: 976 - DNA, 20 bp, Artificial Sequence
  Description of Artificial Sequence: Synthetic oligonucleotide
gaattccactccggtgagcc

SEQ ID NO: 977 - DNA, 20 bp, Artificial Sequence
  Description of Artificial Sequence: Synthetic oligonucleotide
cagagataccacgaagaagt

SEQ ID NO: 978 - DNA, 20 bp, Artificial Sequence
  Description of Artificial Sequence: Synthetic oligonucleotide
cttcttcgtggtatctctgg

SEQ ID NO: 979 - DNA, 21 bp, Artificial Sequence
  Description of Artificial Sequence: Synthetic oligonucleotide
cagtgctgatggtgatggcga

SEQ ID NO: 980 - DNA, 21 bp, Artificial Sequence
  Description of Artificial Sequence: Synthetic oligonucleotide
cgaattccactccggtgagcc

SEQ ID NO: 981 - DNA, 21 bp, Artificial Sequence
  Description of Artificial Sequence: Synthetic oligonucleotide
ccgaattccactccggtgagc

SEQ ID NO: 982 - DNA, 21 bp, Artificial Sequence
  Description of Artificial Sequence: Synthetic oligonucleotide
gctgaagatggaactctgcgt

SEQ ID NO: 983 - DNA, 21 bp, Artificial Sequence
  Description of Artificial Sequence: Synthetic oligonucleotide
cgtgcttgtgtgctgggccgt

SEQ ID NO: 984 - DNA, 21 bp, Artificial Sequence
  Description of Artificial Sequence: Synthetic oligonucleotide
gtgaggaccaggacaaagcag

SEQ ID NO: 985 - DNA, 21 bp, Artificial Sequence
  Description of Artificial Sequence: Synthetic oligonucleotide
tcgatggcaatagccaagagg

SEQ ID NO: 986 - DNA, 21 bp, Artificial Sequence
  Description of Artificial Sequence: Synthetic oligonucleotide
catcgacagatacatcgccat

SEQ ID NO: 987 - DNA, 21 bp, Artificial Sequence
  Description of Artificial Sequence: Synthetic oligonucleotide
gtacaccgaggagcccatggc

SEQ ID NO: 988 - DNA, 21 bp, Artificial Sequence
  Description of Artificial Sequence: Synthetic oligonucleotide
gctccaccatgatgtacaccg

SEQ ID NO: 989 - DNA, 21 bp, Artificial Sequence
  Description of Artificial Sequence: Synthetic oligonucleotide
aagccagtgctgatggtgatg

SEQ ID NO: 990 - DNA, 21 bp, Artificial Sequence
  Description of Artificial Sequence: Synthetic oligonucleotide
caccgcgatgtcagccgccgc

SEQ ID NO: 991 - DNA, 21 bp, Artificial Sequence
  Description of Artificial Sequence: Synthetic oligonucleotide
aggctgaagatggaactctgc

SEQ ID NO: 992 - DNA, 21 bp, Artificial Sequence
  Description of Artificial Sequence: Synthetic oligonucleotide
gccgccgccagagataccacg

SEQ ID NO: 993 - DNA, 21 bp, Artificial Sequence
  Description of Artificial Sequence: Synthetic oligonucleotide
agctccaccatgatgtacacc

SEQ ID NO: 994 - DNA, 21 bp, Artificial Sequence
  Description of Artificial Sequence: Synthetic oligonucleotide
aggcagccatggcaggcagcg

SEQ ID NO: 995 - DNA, 21 bp, Artificial Sequence
  Description of Artificial Sequence: Synthetic oligonucleotide
cctggctcaccggagtggaat

SEQ ID NO: 996 - DNA, 21 bp, Artificial Sequence
  Description of Artificial Sequence: Synthetic oligonucleotide
ccagctccaccatgatgtaca

SEQ ID NO: 997 - DNA, 21 bp, Artificial Sequence
  Description of Artificial Sequence: Synthetic oligonucleotide
accaggacaaagcaggcgaag

SEQ ID NO: 998 - DNA, 21 bp, Artificial Sequence
  Description of Artificial Sequence: Synthetic oligonucleotide
cctgggtaacgtgcttgtgtg

SEQ ID NO: 999 - DNA, 21 bp, Artificial Sequence
  Description of Artificial Sequence: Synthetic oligonucleotide
aggaccaggacaaagcaggcg

SEQ ID NO: 1000 - DNA, 21 bp, Artificial Sequence
  Description of Artificial Sequence: Synthetic oligonucleotide
tcagccgccgccagagatacc

SEQ ID NO: 1001 - DNA, 21 bp, Artificial Sequence
  Description of Artificial Sequence: Synthetic oligonucleotide
ggctcctcggtgtacatcatg

SEQ ID NO: 1002 - DNA, 21 bp, Artificial Sequence
  Description of Artificial Sequence: Synthetic oligonucleotide
ctggcggcggctgacatcgcg

SEQ ID NO: 1003 - DNA, 21 bp, Artificial Sequence
  Description of Artificial Sequence: Synthetic oligonucleotide
gatggaactctgcgtgaggac

SEQ ID NO: 1004 - DNA, 21 bp, Artificial Sequence
  Description of Artificial Sequence: Synthetic oligonucleotide
gctcctcggtgtacatcatgg

SEQ ID NO: 1005 - DNA, 21 bp, Artificial Sequence
  Description of Artificial Sequence: Synthetic oligonucleotide
tgtacaccgaggagcccatgg

SEQ ID NO: 1006 - DNA, 21 bp, Artificial Sequence
  Description of Artificial Sequence: Synthetic oligonucleotide
gccattgctgtgctggccatc

SEQ ID NO: 1007 - DNA, 21 bp, Artificial Sequence
  Description of Artificial Sequence: Synthetic oligonucleotide
caatagccaagaggctgaaga

SEQ ID NO: 1008 - DNA, 21 bp, Artificial Sequence
  Description of Artificial Sequence: Synthetic oligonucleotide
atggtgatggcgaatgggatg

SEQ ID NO: 1009 - DNA, 21 bp, Artificial Sequence
  Description of Artificial Sequence: Synthetic oligonucleotide
atgtacaccgaggagcccatg

SEQ ID NO: 1010 - DNA, 21 bp, Artificial Sequence
  Description of Artificial Sequence: Synthetic oligonucleotide
gtgtggatcaacagcaacctg

SEQ ID NO: 1011 - DNA, 21 bp, Artificial Sequence
  Description of Artificial Sequence: Synthetic oligonucleotide
tgctttgtcctggtcctcacg

SEQ ID NO: 1012 - DNA, 21 bp, Artificial Sequence
  Description of Artificial Sequence: Synthetic oligonucleotide
gtaacccctggctcaccggag

SEQ ID NO: 1013 - DNA, 21 bp, Artificial Sequence
  Description of Artificial Sequence: Synthetic oligonucleotide
ccagcacacaagcacgttacc

SEQ ID NO: 1014 - DNA, 21 bp, Artificial Sequence
  Description of Artificial Sequence: Synthetic oligonucleotide
tatctgtcgatggcaatagcc

SEQ ID NO: 1015 - DNA, 21 bp, Artificial Sequence
  Description of Artificial Sequence: Synthetic oligonucleotide
gcaatagccaagaggctgaag

SEQ ID NO: 1016 - DNA, 21 bp, Artificial Sequence
  Description of Artificial Sequence: Synthetic oligonucleotide
agtgctgatggtgatggcgaa

SEQ ID NO: 1017 - DNA, 21 bp, Artificial Sequence
  Description of Artificial Sequence: Synthetic oligonucleotide
acaccgaggagcccatggcgg

SEQ ID NO: 1018 - DNA, 21 bp, Artificial Sequence
  Description of Artificial Sequence: Synthetic oligonucleotide
cgccatccgaattccactccg

SEQ ID NO: 1019 - DNA, 20 bp, Artificial Sequence
  Description of Artificial Sequence: Synthetic oligonucleotide
tggtgtcactggcggcggcc

SEQ ID NO: 1020 - DNA, 20 bp, Artificial Sequence
  Description of Artificial Sequence: Synthetic oligonucleotide
ccatcaccatcagcaccggg

SEQ ID NO: 1021 - DNA, 20 bp, Artificial Sequence
  Description of Artificial Sequence: Synthetic oligonucleotide
ccatcggcctgactcccatg

SEQ ID NO: 1022 - DNA, 20 bp, Artificial Sequence
  Description of Artificial Sequence: Synthetic oligonucleotide
gctgaccgcagttgttccaa

SEQ ID NO: 1023 - DNA, 20 bp, Artificial Sequence
  Description of Artificial Sequence: Synthetic oligonucleotide
aggatgtggtccccatgaac

SEQ ID NO: 1024 - DNA, 20 bp, Artificial Sequence
  Description of Artificial Sequence: Synthetic oligonucleotide
cctgtgtgctggtgcccctg

SEQ ID NO: 1025 - DNA, 20 bp, Artificial Sequence
  Description of Artificial Sequence: Synthetic oligonucleotide
cggatcttcctggcggcgcg

SEQ ID NO: 1026 - DNA, 20 bp, Artificial Sequence
  Description of Artificial Sequence: Synthetic oligonucleotide
ccctctgctggctgccccta

SEQ ID NO: 1027 - DNA, 20 bp, Artificial Sequence
  Description of Artificial Sequence: Synthetic oligonucleotide
ttctgccccgactgcagcca

SEQ ID NO: 1028 - DNA, 20 bp, Artificial Sequence
  Description of Artificial Sequence: Synthetic oligonucleotide
aaggcagctggcaccagtgc

SEQ ID NO: 1029 - DNA, 21 bp, Artificial Sequence
  Description of Artificial Sequence: Synthetic oligonucleotide
taagggcatcattgccatctg

SEQ ID NO: 1030 - DNA, 21 bp, Artificial Sequence
  Description of Artificial Sequence: Synthetic oligonucleotide
cggcctgactcccatgctagg

SEQ ID NO: 1031 - DNA, 21 bp, Artificial Sequence
  Description of Artificial Sequence: Synthetic oligonucleotide
gcagttgttccaacctagcat

SEQ ID NO: 1032 - DNA, 21 bp, Artificial Sequence
  Description of Artificial Sequence: Synthetic oligonucleotide
ccgcagttgttccaacctagc

SEQ ID NO: 1033 - DNA, 21 bp, Artificial Sequence
  Description of Artificial Sequence: Synthetic oligonucleotide
caagaaccactcccagggctg

SEQ ID NO: 1034 - DNA, 21 bp, Artificial Sequence
  Description of Artificial Sequence: Synthetic oligonucleotide
cttggccctccccgcagccct

SEQ ID NO: 1035 - DNA, 21 bp, Artificial Sequence
  Description of Artificial Sequence: Synthetic oligonucleotide
cacttggccctccccgcagcc

SEQ ID NO: 1036 - DNA, 21 bp, Artificial Sequence
  Description of Artificial Sequence: Synthetic oligonucleotide
ggccaagtggcctgtctcttt

SEQ ID NO: 1037 - DNA, 21 bp, Artificial Sequence
  Description of Artificial Sequence: Synthetic oligonucleotide
ttcatggggaccacatcctca

SEQ ID NO: 1038 - DNA, 21 bp, Artificial Sequence
  Description of Artificial Sequence: Synthetic oligonucleotide
tgaagtacaccatgtagttca

SEQ ID NO: 1039 - DNA, 21 bp, Artificial Sequence
  Description of Artificial Sequence: Synthetic oligonucleotide
ctggtgcccctgctgctcatg

SEQ ID NO: 1040 - DNA, 21 bp, Artificial Sequence
  Description of Artificial Sequence: Synthetic oligonucleotide
gctcatgctgggtgtctattt

SEQ ID NO: 1041 - DNA, 21 bp, Artificial Sequence
  Description of Artificial Sequence: Synthetic oligonucleotide
cttcagctgtcgtcgcgccgc

SEQ ID NO: 1042 - DNA, 21 bp, Artificial Sequence
  Description of Artificial Sequence: Synthetic oligonucleotide
cgcgacgacagctgaagcaga

SEQ ID NO: 1043 - DNA, 21 bp, Artificial Sequence
  Description of Artificial Sequence: Synthetic oligonucleotide
gatggagagccagcctctgcc

SEQ ID NO: 1044 - DNA, 21 bp, Artificial Sequence
  Description of Artificial Sequence: Synthetic oligonucleotide
gcgtggctgcagtcggggcag

SEQ ID NO: 1045 - DNA, 21 bp, Artificial Sequence
  Description of Artificial Sequence: Synthetic oligonucleotide
acgatggccaggtacatgagc

SEQ ID NO: 1046 - DNA, 21 bp, Artificial Sequence
  Description of Artificial Sequence: Synthetic oligonucleotide
ctctcccacaccaattcggtt

SEQ ID NO: 1047 - DNA, 21 bp, Artificial Sequence
  Description of Artificial Sequence: Synthetic oligonucleotide
gattcacaaccgaattggtgt

SEQ ID NO: 1048 - DNA, 21 bp, Artificial Sequence
  Description of Artificial Sequence: Synthetic oligonucleotide
gggattcacaaccgaattggt

SEQ ID NO: 1049 - DNA, 21 bp, Artificial Sequence
  Description of Artificial Sequence: Synthetic oligonucleotide
cgtagatgaagggattcacaa

SEQ ID NO: 1050 - DNA, 21 bp, Artificial Sequence
  Description of Artificial Sequence: Synthetic oligonucleotide
ggatacggtaggcgtagatga

SEQ ID NO: 1051 - DNA, 21 bp, Artificial Sequence
  Description of Artificial Sequence: Synthetic oligonucleotide
tcatctacgcctaccgtatcc

SEQ ID NO: 1052 - DNA, 21 bp, Artificial Sequence
  Description of Artificial Sequence: Synthetic oligonucleotide
cggatacggtaggcgtagatg

SEQ ID NO: 1053 - DNA, 21 bp, Artificial Sequence
  Description of Artificial Sequence: Synthetic oligonucleotide
gcggaaggtctggcggaactc

SEQ ID NO: 1054 - DNA, 21 bp, Artificial Sequence
  Description of Artificial Sequence: Synthetic oligonucleotide
aatgatcttgcggaaggtctg

SEQ ID NO: 1055 - DNA, 21 bp, Artificial Sequence
  Description of Artificial Sequence: Synthetic oligonucleotide
gacgtggctgcgaatgatctt

SEQ ID NO: 1056 - DNA, 21 bp, Artificial Sequence
  Description of Artificial Sequence: Synthetic oligonucleotide
ttgctgcctcaggacgtggct

SEQ ID NO: 1057 - DNA, 21 bp, Artificial Sequence
  Description of Artificial Sequence: Synthetic oligonucleotide
caaggcagctggcaccagtgc

SEQ ID NO: 1058 - DNA, 21 bp, Artificial Sequence
  Description of Artificial Sequence: Synthetic oligonucleotide
cgggcactggtgccagctgcc

SEQ ID NO: 1059 - DNA, 21 bp, Artificial Sequence
  Description of Artificial Sequence: Synthetic oligonucleotide
cttggcagctcatggcagtga

SEQ ID NO: 1060 - DNA, 21 bp, Artificial Sequence
  Description of Artificial Sequence: Synthetic oligonucleotide
ccgtctcaacggccacccgcc

SEQ ID NO: 1061 - DNA, 21 bp, Artificial Sequence
  Description of Artificial Sequence: Synthetic oligonucleotide
cacactcctggcgggtggccg

SEQ ID NO: 1062 - DNA, 21 bp, Artificial Sequence
  Description of Artificial Sequence: Synthetic oligonucleotide
tgccgttggcccacactcctg

SEQ ID NO: 1063 - DNA, 21 bp, Artificial Sequence
  Description of Artificial Sequence: Synthetic oligonucleotide
ccattgggcctccgctcaggg

SEQ ID NO: 1064 - DNA, 21 bp, Artificial Sequence
  Description of Artificial Sequence: Synthetic oligonucleotide
catagccattgggcctccgct

SEQ ID NO: 1065 - DNA, 21 bp, Artificial Sequence
  Description of Artificial Sequence: Synthetic oligonucleotide
aatggctatgccctggggctg

SEQ ID NO: 1066 - DNA, 21 bp, Artificial Sequence
  Description of Artificial Sequence: Synthetic oligonucleotide
atgccctggggctggtgagtg

SEQ ID NO: 1067 - DNA, 21 bp, Artificial Sequence
  Description of Artificial Sequence: Synthetic oligonucleotide
gccctggggctggtgagtgga

SEQ ID NO: 1068 - DNA, 21 bp, Artificial Sequence
  Description of Artificial Sequence: Synthetic oligonucleotide
tggtgagtggagggagtgccc

SEQ ID NO: 1069 - DNA, 21 bp, Artificial Sequence
  Description of Artificial Sequence: Synthetic oligonucleotide
gagggagtgcccaagagtccc

SEQ ID NO: 1070 - DNA, 21 bp, Artificial Sequence
  Description of Artificial Sequence: Synthetic oligonucleotide
agggagtgcccaagagtccca

SEQ ID NO: 1071 - DNA, 21 bp, Artificial Sequence
  Description of Artificial Sequence: Synthetic oligonucleotide
gtctgggaggcccgtgttccc

SEQ ID NO: 1072 - DNA, 21 bp, Artificial Sequence
  Description of Artificial Sequence: Synthetic oligonucleotide
catggctaaggagctccacgt

SEQ ID NO: 1073 - DNA, 21 bp, Artificial Sequence
  Description of Artificial Sequence: Synthetic oligonucleotide
gagctccttagccatgagctc

SEQ ID NO: 1074 - DNA, 21 bp, Artificial Sequence
  Description of Artificial Sequence: Synthetic oligonucleotide
gctccttagccatgagctcaa

SEQ ID NO: 1075 - DNA, 21 bp, Artificial Sequence
  Description of Artificial Sequence: Synthetic oligonucleotide
ggcctagatgaccccctggcc

SEQ ID NO: 1076 - DNA, 21 bp, Artificial Sequence
  Description of Artificial Sequence: Synthetic oligonucleotide
ccccctggcccaggatggagc

SEQ ID NO: 1077 - DNA, 21 bp, Artificial Sequence
  Description of Artificial Sequence: Synthetic oligonucleotide
ctcctgctccatcctgggcca

SEQ ID NO: 1078 - DNA, 20 bp, Artificial Sequence
  Description of Artificial Sequence: Synthetic oligonucleotide
ccgtgatgtacaccgaggag

SEQ ID NO: 1079 - DNA, 20 bp, Artificial Sequence
  Description of Artificial Sequence: Synthetic oligonucleotide
ctttgccatcaccatcagca

SEQ ID NO: 1080 - DNA, 20 bp, Artificial Sequence
  Description of Artificial Sequence: Synthetic oligonucleotide
tttgccatcaccatcagcac

SEQ ID NO: 1081 - DNA, 20 bp, Artificial Sequence
  Description of Artificial Sequence: Synthetic oligonucleotide
ttgcctgcttcgtcctggtc

SEQ ID NO: 1082 - DNA, 20 bp, Artificial Sequence
  Description of Artificial Sequence: Synthetic oligonucleotide
tcctggtcctcacgcagagc

SEQ ID NO: 1083 - DNA, 20 bp, Artificial Sequence
  Description of Artificial Sequence: Synthetic oligonucleotide
tcttcagtctcctggccatc

SEQ ID NO: 1084 - DNA, 20 bp, Artificial Sequence
  Description of Artificial Sequence: Synthetic oligonucleotide
gtctcctggccatcgccatt

SEQ ID NO: 1085 - DNA, 20 bp, Artificial Sequence
  Description of Artificial Sequence: Synthetic oligonucleotide
acctagcatgggagtcaggc

SEQ ID NO: 1086 - DNA, 20 bp, Artificial Sequence
  Description of Artificial Sequence: Synthetic oligonucleotide
aacctagcatgggagtcagg

SEQ ID NO: 1087 - DNA, 20 bp, Artificial Sequence
  Description of Artificial Sequence: Synthetic oligonucleotide
atgctaggttggaacaactg

SEQ ID NO: 1088 - DNA, 20 bp, Artificial Sequence
  Description of Artificial Sequence: Synthetic oligonucleotide
gcagccctgggagtggttct

SEQ ID NO: 1089 - DNA, 20 bp, Artificial Sequence
  Description of Artificial Sequence: Synthetic oligonucleotide
cgcagccctgggagtggttc

SEQ ID NO: 1090 - DNA, 20 bp, Artificial Sequence
  Description of Artificial Sequence: Synthetic oligonucleotide
agggctgcggggagggccaa

SEQ ID NO: 1091 - DNA, 20 bp, Artificial Sequence
  Description of Artificial Sequence: Synthetic oligonucleotide
tggggaccacatcctcaaag

SEQ ID NO: 1092 - DNA, 20 bp, Artificial Sequence
  Description of Artificial Sequence: Synthetic oligonucleotide
catgaactacatggtgtact

SEQ ID NO: 1093 - DNA, 20 bp, Artificial Sequence
  Description of Artificial Sequence: Synthetic oligonucleotide
atgaactacatggtgtactt

SEQ ID NO: 1094 - DNA, 20 bp, Artificial Sequence
  Description of Artificial Sequence: Synthetic oligonucleotide
acttctttgcctgtgtgctg

SEQ ID NO: 1095 - DNA, 20 bp, Artificial Sequence
  Description of Artificial Sequence: Synthetic oligonucleotide
tgctgctcatgctgggtgtc

SEQ ID NO: 1096 - DNA, 20 bp, Artificial Sequence
  Description of Artificial Sequence: Synthetic oligonucleotide
caaatagacacccagcatga

SEQ ID NO: 1097 - DNA, 20 bp, Artificial Sequence
  Description of Artificial Sequence: Synthetic oligonucleotide
gctgtcgtcgcgccgccagg

SEQ ID NO: 1098 - DNA, 20 bp, Artificial Sequence
  Description of Artificial Sequence: Synthetic oligonucleotide
tggcggcgcgacgacagctg

SEQ ID NO: 1099 - DNA, 20 bp, Artificial Sequence
  Description of Artificial Sequence: Synthetic oligonucleotide
tctgcttcagctgtcgtcgc

SEQ ID NO: 1100 - DNA, 20 bp, Artificial Sequence
  Description of Artificial Sequence: Synthetic oligonucleotide
ggcagaggctggctctccat

SEQ ID NO: 1101 - DNA, 20 bp, Artificial Sequence
  Description of Artificial Sequence: Synthetic oligonucleotide
cggcagaggctggctctcca

SEQ ID NO: 1102 - DNA, 20 bp, Artificial Sequence
  Description of Artificial Sequence: Synthetic oligonucleotide
ccggcagaggctggctctcc

SEQ ID NO: 1103 - DNA, 20 bp, Artificial Sequence
  Description of Artificial Sequence: Synthetic oligonucleotide
cactgcagaaggaggtccat

SEQ ID NO: 1104 - DNA, 20 bp, Artificial Sequence
  Description of Artificial Sequence: Synthetic oligonucleotide
tgctgccaagtcactggcca

SEQ ID NO: 1105 - DNA, 20 bp, Artificial Sequence
  Description of Artificial Sequence: Synthetic oligonucleotide
acaatgatggccagtgactt

SEQ ID NO: 1106 - DNA, 20 bp, Artificial Sequence
  Description of Artificial Sequence: Synthetic oligonucleotide
tacacatcatcaactgcttc

SEQ ID NO: 1107 - DNA, 20 bp, Artificial Sequence
  Description of Artificial Sequence: Synthetic oligonucleotide
ctttcttctgccccgactgc

SEQ ID NO: 1108 - DNA, 20 bp, Artificial Sequence
  Description of Artificial Sequence: Synthetic oligonucleotide
gactgcagccacgcccctct

SEQ ID NO: 1109 - DNA, 20 bp, Artificial Sequence
  Description of Artificial Sequence: Synthetic oligonucleotide
tctctggctcatgtacctgg

SEQ ID NO: 1110 - DNA, 20 bp, Artificial Sequence
  Description of Artificial Sequence: Synthetic oligonucleotide
caaccgaattggtgtgggag

SEQ ID NO: 1111 - DNA, 20 bp, Artificial Sequence
  Description of Artificial Sequence: Synthetic oligonucleotide
acaccaattcggttgtgaat

SEQ ID NO: 1112 - DNA, 20 bp, Artificial Sequence
  Description of Artificial Sequence: Synthetic oligonucleotide
gttgtgaatcccttcatcta

SEQ ID NO: 1113 - DNA, 20 bp, Artificial Sequence
  Description of Artificial Sequence: Synthetic oligonucleotide
ttcatctacgcctaccgtat

SEQ ID NO: 1114 - DNA, 20 bp, Artificial Sequence
  Description of Artificial Sequence: Synthetic oligonucleotide
tctacgcctaccgtatccgc

SEQ ID NO: 1115 - DNA, 20 bp, Artificial Sequence
  Description of Artificial Sequence: Synthetic oligonucleotide
cgagttccgccagaccttcc

SEQ ID NO: 1116 - DNA, 20 bp, Artificial Sequence
  Description of Artificial Sequence: Synthetic oligonucleotide
gccagaccttccgcaagatc

SEQ ID NO: 1117 - DNA, 20 bp, Artificial Sequence
  Description of Artificial Sequence: Synthetic oligonucleotide
ccagaccttccgcaagatca

SEQ ID NO: 1118 - DNA, 20 bp, Artificial Sequence
  Description of Artificial Sequence: Synthetic oligonucleotide
gcaagatcattcgcagccac

SEQ ID NO: 1119 - DNA, 20 bp, Artificial Sequence
  Description of Artificial Sequence: Synthetic oligonucleotide
caagatcattcgcagccacg

SEQ ID NO: 1120 - DNA, 20 bp, Artificial Sequence
  Description of Artificial Sequence: Synthetic oligonucleotide
cagccacgtcctgaggcagc

SEQ ID NO: 1121 - DNA, 20 bp, Artificial Sequence
  Description of Artificial Sequence: Synthetic oligonucleotide
aggcagctggcaccagtgcc

SEQ ID NO: 1122 - DNA, 20 bp, Artificial Sequence
  Description of Artificial Sequence: Synthetic oligonucleotide
tcactgccatgagctgccaa

SEQ ID NO: 1123 - DNA, 20 bp, Artificial Sequence
  Description of Artificial Sequence: Synthetic oligonucleotide
tctcaacggccacccgccag

SEQ ID NO: 1124 - DNA, 20 bp, Artificial Sequence
  Description of Artificial Sequence: Synthetic oligonucleotide
ctcagggtggggagcactgc

SEQ ID NO: 1125 - DNA, 20 bp, Artificial Sequence
  Description of Artificial Sequence: Synthetic oligonucleotide
caccctgagcggaggcccaa

SEQ ID NO: 1126 - DNA, 20 bp, Artificial Sequence
  Description of Artificial Sequence: Synthetic oligonucleotide
accctgagcggaggcccaat

SEQ ID NO: 1127 - DNA, 20 bp, Artificial Sequence
  Description of Artificial Sequence: Synthetic oligonucleotide
agggcatagccattgggcct

SEQ ID NO: 1128 - DNA, 20 bp, Artificial Sequence
  Description of Artificial Sequence: Synthetic oligonucleotide
ctcaccagccccagggcata

SEQ ID NO: 1129 - DNA, 20 bp, Artificial Sequence
  Description of Artificial Sequence: Synthetic oligonucleotide
tccactcaccagccccaggg

SEQ ID NO: 1130 - DNA, 20 bp, Artificial Sequence
  Description of Artificial Sequence: Synthetic oligonucleotide
tgggactcttgggcactccc

SEQ ID NO: 1131 - DNA, 20 bp, Artificial Sequence
  Description of Artificial Sequence: Synthetic oligonucleotide
ctgggactcttgggcactcc

SEQ ID NO: 1132 - DNA, 20 bp, Artificial Sequence
  Description of Artificial Sequence: Synthetic oligonucleotide
cctgggactcttgggcactc

SEQ ID NO: 1133 - DNA, 20 bp, Artificial Sequence
  Description of Artificial Sequence: Synthetic oligonucleotide
aggggaacacgggcctccca

SEQ ID NO: 1134 - DNA, 20 bp, Artificial Sequence
  Description of Artificial Sequence: Synthetic oligonucleotide
cgtctgggaggcccgtgttc

SEQ ID NO: 1135 - DNA, 20 bp, Artificial Sequence
  Description of Artificial Sequence: Synthetic oligonucleotide
agacgtggagctccttagcc

SEQ ID NO: 1136 - DNA, 20 bp, Artificial Sequence
  Description of Artificial Sequence: Synthetic oligonucleotide
ttgagctcatggctaaggag

SEQ ID NO: 1137 - DNA, 20 bp, Artificial Sequence
  Description of Artificial Sequence: Synthetic oligonucleotide
ctggcctagatgaccccctg

SEQ ID NO: 1138 - DNA, 20 bp, Artificial Sequence
  Description of Artificial Sequence: Synthetic oligonucleotide
tggcctagatgaccccctgg

SEQ ID NO: 1139 - DNA, 20 bp, Artificial Sequence
  Description of Artificial Sequence: Synthetic oligonucleotide
tcctgggccagggggtcatc

SEQ ID NO: 1140 - DNA, 20 bp, Artificial Sequence
  Description of Artificial Sequence: Synthetic oligonucleotide
ctggcccaggatggagcagg

SEQ ID NO: 1141 - DNA, 20 bp, Artificial Sequence
  Description of Artificial Sequence: Synthetic oligonucleotide
tggcccaggatggagcagga

SEQ ID NO: 1142 - DNA, 20 bp, Artificial Sequence
  Description of Artificial Sequence: Synthetic oligonucleotide
cgcgagttccgccagacctt

SEQ ID NO: 1143 - DNA, 20 bp, Artificial Sequence
  Description of Artificial Sequence: Synthetic oligonucleotide
ccctggggctggtgagtgga

SEQ ID NO: 1144-1152 - skipped (9 entries)

SEQ ID NO: 1153 - RNA, 20 nt, Artificial Sequence
  Description of Artificial Sequence: Synthetic oligonucleotide
uaauuucuacucuuguagau

SEQ ID NO: 1154 - DNA, 25 bp, Artificial Sequence
  Description of Artificial Sequence: Synthetic oligonucleotide
atgtgtttttgtcaaaagacctttt

SEQ ID NO: 1155 - RNA, 20 nt, Artificial Sequence
  Description of Artificial Sequence: Synthetic oligonucleotide
gguguacagcaguggcuggu

SEQ ID NO: 1156 - DNA, 65 bp, Artificial Sequence
  Description of Artificial Sequence: Synthetic oligonucleotide
  Description of Combined DNA/RNA Molecule: Synthetic oligonucleotide
atgtgtttttgtcaaaagaccttttuaauuucuacucuuguagaugguguacagcaguggcuggu

SEQ ID NO: 1157 - RNA, 20 nt, Artificial Sequence
  Description of Artificial Sequence: Synthetic oligonucleotide
ugaugugagauuuuccaccu

SEQ ID NO: 1158 - DNA, 65 bp, Artificial Sequence
  Description of Artificial Sequence: Synthetic oligonucleotide
  Description of Combined DNA/RNA Molecule: Synthetic oligonucleotide
atgtgtttttgtcaaaagaccttttuaauuucuacucuuguagauugaugugagauuuuccaccu

SEQ ID NO: 1159 - RNA, 20 nt, Artificial Sequence
  Description of Artificial Sequence: Synthetic oligonucleotide
ccaucggccugacucccaug

SEQ ID NO: 1160 - DNA, 65 bp, Artificial Sequence
  Description of Artificial Sequence: Synthetic oligonucleotide
  Description of Combined DNA/RNA Molecule: Synthetic oligonucleotide
atgtgtttttgtcaaaagaccttttuaauuucuacucuuguagauccaucggccugacucccaug

SEQ ID NO: 1161 - RNA, 21 nt, Artificial Sequence
  Description of Artificial Sequence: Synthetic oligonucleotide
ugaugugagauuuuccaccug

SEQ ID NO: 1162 - RNA, 21 nt, Artificial Sequence
  Description of Artificial Sequence: Synthetic oligonucleotide
acugacagcgugaacagguag

SEQ ID NO: 1163 - RNA, 21 nt, Artificial Sequence
  Description of Artificial Sequence: Synthetic oligonucleotide
ccaucggccugacucccaugc

SEQ ID NO: 1164 - RNA, 21 nt, Artificial Sequence
  Description of Artificial Sequence: Synthetic oligonucleotide
ccaucaccaucagcaccgggu

SEQ ID NO: 1165 - RNA, 21 nt, Artificial Sequence
  Description of Artificial Sequence: Synthetic oligonucleotide
ccugugugcuggugccccugc

SEQ ID NO: 1166 - RNA, 21 nt, Artificial Sequence
  Description of Artificial Sequence: Synthetic oligonucleotide
ugcagagaaagguggcucuau

SEQ ID NO: 1167 - RNA, 21 nt, Artificial Sequence
  Description of Artificial Sequence: Synthetic oligonucleotide
ucugcagaaauguuccccguu

SEQ ID NO: 1168 - RNA, 21 nt, Artificial Sequence
  Description of Artificial Sequence: Synthetic oligonucleotide
uaggaccuccaggaagauucu

SEQ ID NO: 1169 - RNA, 21 nt, Artificial Sequence
  Description of Artificial Sequence: Synthetic oligonucleotide
gcaacugaacaggaaauaacc

SEQ ID NO: 1170 - RNA, 21 nt, Artificial Sequence
  Description of Artificial Sequence: Synthetic oligonucleotide
guugcugccucuuuggguuug

SEQ ID NO: 1171 - RNA, 21 nt, Artificial Sequence
  Description of Artificial Sequence: Synthetic oligonucleotide
aagggaaugacaaaaccuauc

SEQ ID NO: 1172 - DNA, 21 bp, Artificial Sequence
  Description of Artificial Sequence: Synthetic oligonucleotide
tgatgtgagattttccacctg

SEQ ID NO: 1173 - DNA, 21 bp, Artificial Sequence
  Description of Artificial Sequence: Synthetic oligonucleotide
actgacagcgtgaacaggtag

SEQ ID NO: 1174 - DNA, 21 bp, Artificial Sequence
  Description of Artificial Sequence: Synthetic oligonucleotide
ccatcggcctgactcccatgc

SEQ ID NO: 1175 - DNA, 21 bp, Artificial Sequence
  Description of Artificial Sequence: Synthetic oligonucleotide
tgcagagaaaggtggctctat

SEQ ID NO: 1176 - DNA, 21 bp, Artificial Sequence
  Description of Artificial Sequence: Synthetic oligonucleotide
gcaactgaacaggaaataacc

SEQ ID NO: 1177-2249 - skipped (1073 entries)

SEQ ID NO: 2250 - DNA, 21 bp, Artificial Sequence
  Description of Artificial Sequence: Synthetic oligonucleotide
aggctttggctggttctttag

SEQ ID NO: 2251-2259 - skipped (9 entries)

SEQ ID NO: 2260 - DNA, 21 bp, Artificial Sequence
  Description of Artificial Sequence: Synthetic oligonucleotide
gctggttctttagtcagcttc

SEQ ID NO: 2261-2269 - skipped (9 entries)

SEQ ID NO: 2270 - DNA, 21 bp, Artificial Sequence
  Description of Artificial Sequence: Synthetic oligonucleotide
gtcagcttcttcctctgattc

SEQ ID NO: 2271-2279 - skipped (9 entries)

SEQ ID NO: 2280 - DNA, 21 bp, Artificial Sequence
  Description of Artificial Sequence: Synthetic oligonucleotide
taaccaggttagccactgatt

SEQ ID NO: 2281-2289 - skipped (9 entries)

SEQ ID NO: 2290 - DNA, 21 bp, Artificial Sequence
  Description of Artificial Sequence: Synthetic oligonucleotide
acaaaagacttacctggaaca

SEQ ID NO: 2291-2299 - skipped (9 entries)

SEQ ID NO: 2300 - DNA, 21 bp, Artificial Sequence
  Description of Artificial Sequence: Synthetic oligonucleotide
ccggaaactcttgggttatat

SEQ ID NO: 2301-2309 - skipped (9 entries)

SEQ ID NO: 2310 - DNA, 21 bp, Artificial Sequence
  Description of Artificial Sequence: Synthetic oligonucleotide
caagccaagaaagcttcttct

SEQ ID NO: 2311-2319 - skipped (9 entries)

SEQ ID NO: 2320 - DNA, 21 bp, Artificial Sequence
  Description of Artificial Sequence: Synthetic oligonucleotide
catgtcatagaagtgcacaaa

SEQ ID NO: 2321-2329 - skipped (9 entries)

SEQ ID NO: 2330 - DNA, 21 bp, Artificial Sequence
  Description of Artificial Sequence: Synthetic oligonucleotide
ggaagttgctgttatagcagt

SEQ ID NO: 2331-2339 - skipped (9 entries)

SEQ ID NO: 2340 - DNA, 21 bp, Artificial Sequence
  Description of Artificial Sequence: Synthetic oligonucleotide
tgcattactggcttgaaagat

SEQ ID NO: 2341-2349 - skipped (9 entries)

SEQ ID NO: 2350 - DNA, 21 bp, Artificial Sequence
  Description of Artificial Sequence: Synthetic oligonucleotide
ctgctctaactgttctttgga

SEQ ID NO: 2351-2359 - skipped (9 entries)

SEQ ID NO: 2360 - DNA, 21 bp, Artificial Sequence
  Description of Artificial Sequence: Synthetic oligonucleotide
gaaggagcagaggatgaatct

SEQ ID NO: 2361-2369 - skipped (9 entries)

SEQ ID NO: 2370 - DNA, 21 bp, Artificial Sequence
  Description of Artificial Sequence: Synthetic oligonucleotide
atcgctgggggggtttacttc

SEQ ID NO: 2371-2379 - skipped (9 entries)

SEQ ID NO: 2380 - DNA, 21 bp, Artificial Sequence
  Description of Artificial Sequence: Synthetic oligonucleotide
cttcactagaaatgtactgta

SEQ ID NO: 2381-2389 - skipped (9 entries)

SEQ ID NO: 2390 - DNA, 21 bp, Artificial Sequence
  Description of Artificial Sequence: Synthetic oligonucleotide
tctacatgaagtttgggagag

SEQ ID NO: 2391-2399 - skipped (9 entries)

SEQ ID NO: 2400 - DNA, 21 bp, Artificial Sequence
  Description of Artificial Sequence: Synthetic oligonucleotide
ggagagatgttatctttaatc

SEQ ID NO: 2401-2409 - skipped (9 entries)

SEQ ID NO: 2410 - DNA, 21 bp, Artificial Sequence
  Description of Artificial Sequence: Synthetic oligonucleotide
tatatggtttgaggggatgga

SEQ ID NO: 2411-2419 - skipped (9 entries)

SEQ ID NO: 2420 - DNA, 21 bp, Artificial Sequence
  Description of Artificial Sequence: Synthetic oligonucleotide
aggggatggatccaactttat

SEQ ID NO: 2421-2429 - skipped (9 entries)

SEQ ID NO: 2430 - DNA, 21 bp, Artificial Sequence
  Description of Artificial Sequence: Synthetic oligonucleotide
taggtgaatcagtggctaacc

SEQ ID NO: 2431-2439 - skipped (9 entries)

SEQ ID NO: 2440 - DNA, 21 bp, Artificial Sequence
  Description of Artificial Sequence: Synthetic oligonucleotide
caaatcttaatttataggtga

SEQ ID NO: 2441-2449 - skipped (9 entries)

SEQ ID NO: 2450 - DNA, 21 bp, Artificial Sequence
  Description of Artificial Sequence: Synthetic oligonucleotide
atttacaaatcttaatttata

SEQ ID NO: 2451-2459 - skipped (9 entries)

SEQ ID NO: 2460 - DNA, 21 bp, Artificial Sequence
  Description of Artificial Sequence: Synthetic oligonucleotide
cgggaaaaggcaaggctttgt

SEQ ID NO: 2461-2469 - skipped (9 entries)

SEQ ID NO: 2470 - DNA, 21 bp, Artificial Sequence
  Description of Artificial Sequence: Synthetic oligonucleotide
ttggcttggaaagaagatata

SEQ ID NO: 2471-2479 - skipped (9 entries)

SEQ ID NO: 2480 - DNA, 21 bp, Artificial Sequence
  Description of Artificial Sequence: Synthetic oligonucleotide
tgcacttctatgacatggaaa

SEQ ID NO: 2481-2489 - skipped (9 entries)

SEQ ID NO: 2490 - DNA, 21 bp, Artificial Sequence
  Description of Artificial Sequence: Synthetic oligonucleotide
aggcatgttacttcgcttttt

SEQ ID NO: 2491-2499 - skipped (9 entries)

SEQ ID NO: 2500 - DNA, 21 bp, Artificial Sequence
  Description of Artificial Sequence: Synthetic oligonucleotide
ttcatgatcacgttgatctac

SEQ ID NO: 2501-2509 - skipped (9 entries)

SEQ ID NO: 2510 - DNA, 21 bp, Artificial Sequence
  Description of Artificial Sequence: Synthetic oligonucleotide
aagccagtaatgcagaaattt

SEQ ID NO: 2511-2519 - skipped (9 entries)

SEQ ID NO: 2520 - DNA, 21 bp, Artificial Sequence
  Description of Artificial Sequence: Synthetic oligonucleotide
tagtgaagtaaacccccccag

SEQ ID NO: 2521-2529 - skipped (9 entries)

SEQ ID NO: 2530 - DNA, 21 bp, Artificial Sequence
  Description of Artificial Sequence: Synthetic oligonucleotide
tgtccagcttcttacagtaca

SEQ ID NO: 2531-2539 - skipped (9 entries)

SEQ ID NO: 2540 - DNA, 21 bp, Artificial Sequence
  Description of Artificial Sequence: Synthetic oligonucleotide
tgaacatcttaatgactaggt

SEQ ID NO: 2541-2549 - skipped (9 entries)

SEQ ID NO: 2550 - DNA, 21 bp, Artificial Sequence
  Description of Artificial Sequence: Synthetic oligonucleotide
aagaccttaccttttttaata

SEQ ID NO: 2551-2559 - skipped (9 entries)

SEQ ID NO: 2560 - DNA, 21 bp, Artificial Sequence
  Description of Artificial Sequence: Synthetic oligonucleotide
caatgaacttaccttccaaca

SEQ ID NO: 2561-2569 - skipped (9 entries)

SEQ ID NO: 2570 - DNA, 21 bp, Artificial Sequence
  Description of Artificial Sequence: Synthetic oligonucleotide
agcagggcagaataaaaacca

SEQ ID NO: 2571-2579 - skipped (9 entries)

SEQ ID NO: 2580 - DNA, 21 bp, Artificial Sequence
  Description of Artificial Sequence: Synthetic oligonucleotide
ttcataatttcagcagggcag

SEQ ID NO: 2581-2589 - skipped (9 entries)

SEQ ID NO: 2590 - DNA, 21 bp, Artificial Sequence
  Description of Artificial Sequence: Synthetic oligonucleotide
ctttgttcataatttcagcag

SEQ ID NO: 2591-2599 - skipped (9 entries)

SEQ ID NO: 2600 - DNA, 21 bp, Artificial Sequence
  Description of Artificial Sequence: Synthetic oligonucleotide
caggctgcaaactacttagac

SEQ ID NO: 2601-2609 - skipped (9 entries)

SEQ ID NO: 2610 - DNA, 21 bp, Artificial Sequence
  Description of Artificial Sequence: Synthetic oligonucleotide
ttgttgtaggtcattcagtgg

SEQ ID NO: 2611-2619 - skipped (9 entries)

SEQ ID NO: 2620 - DNA, 21 bp, Artificial Sequence
  Description of Artificial Sequence: Synthetic oligonucleotide
ttagatttgggaatggatgat

SEQ ID NO: 2621-2629 - skipped (9 entries)

SEQ ID NO: 2630 - DNA, 21 bp, Artificial Sequence
  Description of Artificial Sequence: Synthetic oligonucleotide
ttctggttttcttagatttgg

SEQ ID NO: 2631-2639 - skipped (9 entries)

SEQ ID NO: 2640 - DNA, 21 bp, Artificial Sequence
  Description of Artificial Sequence: Synthetic oligonucleotide
gatgccttcaattaagttgca

SEQ ID NO: 2641-2649 - skipped (9 entries)

SEQ ID NO: 2650 - DNA, 21 bp, Artificial Sequence
  Description of Artificial Sequence: Synthetic oligonucleotide
atgtcctttttttttagatgc

SEQ ID NO: 2651-2659 - skipped (9 entries)

SEQ ID NO: 2660 - DNA, 21 bp, Artificial Sequence
  Description of Artificial Sequence: Synthetic oligonucleotide
aagctttatgctgaaaaggtg

SEQ ID NO: 2661-2669 - skipped (9 entries)

SEQ ID NO: 2670 - DNA, 21 bp, Artificial Sequence
  Description of Artificial Sequence: Synthetic oligonucleotide
aagggcctgctatggtgtgct

SEQ ID NO: 2671-2679 - skipped (9 entries)

SEQ ID NO: 2680 - DNA, 21 bp, Artificial Sequence
  Description of Artificial Sequence: Synthetic oligonucleotide
aaggaagcaagggatatcctg

SEQ ID NO: 2681-2689 - skipped (9 entries)

SEQ ID NO: 2690 - DNA, 21 bp, Artificial Sequence
  Description of Artificial Sequence: Synthetic oligonucleotide
agcataaagctttaaaggaag

SEQ ID NO: 2691-2699 - skipped (9 entries)

SEQ ID NO: 2700 - DNA, 21 bp, Artificial Sequence
  Description of Artificial Sequence: Synthetic oligonucleotide
ccagacaccacaacctcgcag

SEQ ID NO: 2701-2709 - skipped (9 entries)

SEQ ID NO: 2710 - DNA, 21 bp, Artificial Sequence
  Description of Artificial Sequence: Synthetic oligonucleotide
ccaagcactctcagctgctca

SEQ ID NO: 2711-2719 - skipped (9 entries)

SEQ ID NO: 2720 - DNA, 21 bp, Artificial Sequence
  Description of Artificial Sequence: Synthetic oligonucleotide
ttcttccatcttttcccacag

SEQ ID NO: 2721-2729 - skipped (9 entries)

SEQ ID NO: 2730 - DNA, 21 bp, Artificial Sequence
  Description of Artificial Sequence: Synthetic oligonucleotide
ccacaggtggcagctgccaac

SEQ ID NO: 2731-2739 - skipped (9 entries)

SEQ ID NO: 2740 - DNA, 21 bp, Artificial Sequence
  Description of Artificial Sequence: Synthetic oligonucleotide
tctgacgtcccccatagatct

SEQ ID NO: 2741-2749 - skipped (9 entries)

SEQ ID NO: 2750 - DNA, 21 bp, Artificial Sequence
  Description of Artificial Sequence: Synthetic oligonucleotide
agccctcttaccttccacctc

SEQ ID NO: 2751-2759 - skipped (9 entries)

SEQ ID NO: 2760 - DNA, 21 bp, Artificial Sequence
  Description of Artificial Sequence: Synthetic oligonucleotide
tgttcatttattgaagttcta

SEQ ID NO: 2761-2769 - skipped (9 entries)

SEQ ID NO: 2770 - DNA, 21 bp, Artificial Sequence
  Description of Artificial Sequence: Synthetic oligonucleotide
gttcggccttcttcctcttct

SEQ ID NO: 2771-2779 - skipped (9 entries)

SEQ ID NO: 2780 - DNA, 21 bp, Artificial Sequence
  Description of Artificial Sequence: Synthetic oligonucleotide
tagaccatgtctgctaaagag

SEQ ID NO: 2781-2789 - skipped (9 entries)

SEQ ID NO: 2790 - DNA, 21 bp, Artificial Sequence
  Description of Artificial Sequence: Synthetic oligonucleotide
gaaaaataactaaacatgggc

SEQ ID NO: 2791-2799 - skipped (9 entries)

SEQ ID NO: 2800 - DNA, 21 bp, Artificial Sequence
  Description of Artificial Sequence: Synthetic oligonucleotide
ccccaaatagaacctaccaag

SEQ ID NO: 2801-2809 - skipped (9 entries)

SEQ ID NO: 2810 - DNA, 21 bp, Artificial Sequence
  Description of Artificial Sequence: Synthetic oligonucleotide
acttcaggtaccccaatctga

SEQ ID NO: 2811-2819 - skipped (9 entries)

SEQ ID NO: 2820 - DNA, 21 bp, Artificial Sequence
  Description of Artificial Sequence: Synthetic oligonucleotide
ctttttcacttcaggtacccc

SEQ ID NO: 2821-2829 - skipped (9 entries)

SEQ ID NO: 2830 - DNA, 21 bp, Artificial Sequence
  Description of Artificial Sequence: Synthetic oligonucleotide
tgtttgctttttcacttcagg

SEQ ID NO: 2831-2839 - skipped (9 entries)

SEQ ID NO: 2840 - DNA, 21 bp, Artificial Sequence
  Description of Artificial Sequence: Synthetic oligonucleotide
accacagtatcaatggagtga

SEQ ID NO: 2841-2849 - skipped (9 entries)

SEQ ID NO: 2850 - DNA, 21 bp, Artificial Sequence
  Description of Artificial Sequence: Synthetic oligonucleotide
tggtccgttttcaccacagta

SEQ ID NO: 2851-2859 - skipped (9 entries)

SEQ ID NO: 2860 - DNA, 21 bp, Artificial Sequence
  Description of Artificial Sequence: Synthetic oligonucleotide
aggtcaaggccttcttggctg

SEQ ID NO: 2861-2869 - skipped (9 entries)

SEQ ID NO: 2870 - DNA, 21 bp, Artificial Sequence
  Description of Artificial Sequence: Synthetic oligonucleotide
accacttcccccctcctttca

SEQ ID NO: 2871-2879 - skipped (9 entries)

SEQ ID NO: 2880 - DNA, 21 bp, Artificial Sequence
  Description of Artificial Sequence: Synthetic oligonucleotide
ctcacctgccataaatatagg

SEQ ID NO: 2881-2889 - skipped (9 entries)

SEQ ID NO: 2890 - DNA, 21 bp, Artificial Sequence
  Description of Artificial Sequence: Synthetic oligonucleotide
cagtatgagggcacctacaag

SEQ ID NO: 2891-2899 - skipped (9 entries)

SEQ ID NO: 2900 - DNA, 21 bp, Artificial Sequence
  Description of Artificial Sequence: Synthetic oligonucleotide
accccactgctgcaccagatt

SEQ ID NO: 2901-2909 - skipped (9 entries)

SEQ ID NO: 2910 - DNA, 21 bp, Artificial Sequence
  Description of Artificial Sequence: Synthetic oligonucleotide
cgccacgtaggggtgcccttc

SEQ ID NO: 2911-2919 - skipped (9 entries)

SEQ ID NO: 2920 - DNA, 21 bp, Artificial Sequence
  Description of Artificial Sequence: Synthetic oligonucleotide
gcttgtagtgccgctgctgca

SEQ ID NO: 2921-2929 - skipped (9 entries)

SEQ ID NO: 2930 - DNA, 21 bp, Artificial Sequence
  Description of Artificial Sequence: Synthetic oligonucleotide
ccgtggtgctcgaagggctct

SEQ ID NO: 2931-2939 - skipped (9 entries)

SEQ ID NO: 2940 - DNA, 21 bp, Artificial Sequence
  Description of Artificial Sequence: Synthetic oligonucleotide
ttgcagcacaagctccgggtg

SEQ ID NO: 2941-2949 - skipped (9 entries)

SEQ ID NO: 2950 - DNA, 21 bp, Artificial Sequence
  Description of Artificial Sequence: Synthetic oligonucleotide
tgcctaatttgttgcagcaca

SEQ ID NO: 2951-2959 - skipped (9 entries)

SEQ ID NO: 2960 - DNA, 21 bp, Artificial Sequence
  Description of Artificial Sequence: Synthetic oligonucleotide
tagcaagaagatccatcgcag

SEQ ID NO: 2961-2969 - skipped (9 entries)

SEQ ID NO: 2970 - DNA, 21 bp, Artificial Sequence
  Description of Artificial Sequence: Synthetic oligonucleotide
agtcttcccatgcacaagatg

SEQ ID NO: 2971-2979 - skipped (9 entries)

SEQ ID NO: 2980 - DNA, 21 bp, Artificial Sequence
  Description of Artificial Sequence: Synthetic oligonucleotide
cctttcagtcttcccatgcac

SEQ ID NO: 2981-2989 - skipped (9 entries)

SEQ ID NO: 2990 - DNA, 21 bp, Artificial Sequence
  Description of Artificial Sequence: Synthetic oligonucleotide
tccccagctgagtccagattg

SEQ ID NO: 2991-2999 - skipped (9 entries)

SEQ ID NO: 3000 - DNA, 21 bp, Artificial Sequence
  Description of Artificial Sequence: Synthetic oligonucleotide
ttcctcttagtacctttgtgt

SEQ ID NO: 3001-3009 - skipped (9 entries)

SEQ ID NO: 3010 - DNA, 21 bp, Artificial Sequence
  Description of Artificial Sequence: Synthetic oligonucleotide
gatggctcccgcaaagaaggg

SEQ ID NO: 3011-3019 - skipped (9 entries)

SEQ ID NO: 3020 - DNA, 21 bp, Artificial Sequence
  Description of Artificial Sequence: Synthetic oligonucleotide
aatcgtaggggcttcaagaag

SEQ ID NO: 3021-3029 - skipped (9 entries)

SEQ ID NO: 3030 - DNA, 21 bp, Artificial Sequence
  Description of Artificial Sequence: Synthetic oligonucleotide
ttaggaatgtgccataccgaa

SEQ ID NO: 3031-3039 - skipped (9 entries)

SEQ ID NO: 3040 - DNA, 21 bp, Artificial Sequence
  Description of Artificial Sequence: Synthetic oligonucleotide
cagatctacagacagtcaatg

SEQ ID NO: 3041-3049 - skipped (9 entries)

SEQ ID NO: 3050 - DNA, 21 bp, Artificial Sequence
  Description of Artificial Sequence: Synthetic oligonucleotide
gcaccttattcctttggccca

SEQ ID NO: 3051-3059 - skipped (9 entries)

SEQ ID NO: 3060 - DNA, 21 bp, Artificial Sequence
  Description of Artificial Sequence: Synthetic oligonucleotide
tgggatggagaacttactttt

SEQ ID NO: 3061-3069 - skipped (9 entries)

SEQ ID NO: 3070 - DNA, 21 bp, Artificial Sequence
  Description of Artificial Sequence: Synthetic oligonucleotide
atctgacgatcagcgattagt

SEQ ID NO: 3071-3079 - skipped (9 entries)

SEQ ID NO: 3080 - DNA, 21 bp, Artificial Sequence
  Description of Artificial Sequence: Synthetic oligonucleotide
actgtctttttcatattttag

SEQ ID NO: 3081-3089 - skipped (9 entries)

SEQ ID NO: 3090 - DNA, 21 bp, Artificial Sequence
  Description of Artificial Sequence: Synthetic oligonucleotide
atattttaggacccagatgat

SEQ ID NO: 3091-3099 - skipped (9 entries)

SEQ ID NO: 3100 - DNA, 21 bp, Artificial Sequence
  Description of Artificial Sequence: Synthetic oligonucleotide
ggacccagatgatgtggtacc

SEQ ID NO: 3101-3109 - skipped (9 entries)

SEQ ID NO: 3110 - DNA, 21 bp, Artificial Sequence
  Description of Artificial Sequence: Synthetic oligonucleotide
gactagcatttatgcttgcag

SEQ ID NO: 3111-3119 - skipped (9 entries)

SEQ ID NO: 3120 - DNA, 21 bp, Artificial Sequence
  Description of Artificial Sequence: Synthetic oligonucleotide
tgcttgcaggtgttattctag

SEQ ID NO: 3121-3129 - skipped (9 entries)

SEQ ID NO: 3130 - DNA, 21 bp, Artificial Sequence
  Description of Artificial Sequence: Synthetic oligonucleotide
tgaatgtaggctggaacctat

SEQ ID NO: 3131-3139 - skipped (9 entries)

SEQ ID NO: 3140 - DNA, 21 bp, Artificial Sequence
  Description of Artificial Sequence: Synthetic oligonucleotide
cctcagtcctatctgattcat

SEQ ID NO: 3141-3149 - skipped (9 entries)

SEQ ID NO: 3150 - DNA, 21 bp, Artificial Sequence
  Description of Artificial Sequence: Synthetic oligonucleotide
tttatttatcgactgtgtcat

SEQ ID NO: 3151-3159 - skipped (9 entries)

SEQ ID NO: 3160 - DNA, 21 bp, Artificial Sequence
  Description of Artificial Sequence: Synthetic oligonucleotide
tttatcgactgtgtcatgaca

SEQ ID NO: 3161-3169 - skipped (9 entries)

SEQ ID NO: 3170 - DNA, 21 bp, Artificial Sequence
  Description of Artificial Sequence: Synthetic oligonucleotide
tcgactgtgtcatgacaagga

SEQ ID NO: 3171-3179 - skipped (9 entries)

SEQ ID NO: 3180 - DNA, 21 bp, Artificial Sequence
  Description of Artificial Sequence: Synthetic oligonucleotide
cctctccaacaggtattcaga

SEQ ID NO: 3181-3189 - skipped (9 entries)

SEQ ID NO: 3190 - DNA, 21 bp, Artificial Sequence
  Description of Artificial Sequence: Synthetic oligonucleotide
gcaattcggcattttgaaaac

SEQ ID NO: 3191-3199 - skipped (9 entries)

SEQ ID NO: 3200 - DNA, 21 bp, Artificial Sequence
  Description of Artificial Sequence: Synthetic oligonucleotide
aaaacaaatttgccgtggaaa

SEQ ID NO: 3201-3209 - skipped (9 entries)

SEQ ID NO: 3210 - DNA, 21 bp, Artificial Sequence
  Description of Artificial Sequence: Synthetic oligonucleotide
ccgtggaaactttaatttgtt

SEQ ID NO: 3211-3219 - skipped (9 entries)

SEQ ID NO: 3220 - DNA, 21 bp, Artificial Sequence
  Description of Artificial Sequence: Synthetic oligonucleotide
gccaactggtaccacatcatc

SEQ ID NO: 3221-3229 - skipped (9 entries)

SEQ ID NO: 3230 - DNA, 21 bp, Artificial Sequence
  Description of Artificial Sequence: Synthetic oligonucleotide
tacaagtatgctcctcctaga

SEQ ID NO: 3231-3239 - skipped (9 entries)

SEQ ID NO: 3240 - DNA, 21 bp, Artificial Sequence
  Description of Artificial Sequence: Synthetic oligonucleotide
cacttacttgaagtgcaaaat

SEQ ID NO: 3241-3249 - skipped (9 entries)

SEQ ID NO: 3250 - DNA, 21 bp, Artificial Sequence
  Description of Artificial Sequence: Synthetic oligonucleotide
aatgcgatcagtaataaccat

SEQ ID NO: 3251-3259 - skipped (9 entries)

SEQ ID NO: 3260 - DNA, 21 bp, Artificial Sequence
  Description of Artificial Sequence: Synthetic oligonucleotide
cttgtcatgacacagtcgata

SEQ ID NO: 3261-3269 - skipped (9 entries)

SEQ ID NO: 3270 - DNA, 21 bp, Artificial Sequence
  Description of Artificial Sequence: Synthetic oligonucleotide
taagtttccttgtcatgacac

SEQ ID NO: 3271-3279 - skipped (9 entries)

SEQ ID NO: 3280 - DNA, 21 bp, Artificial Sequence
  Description of Artificial Sequence: Synthetic oligonucleotide
tctgcgttgcagtttgtaagt

SEQ ID NO: 3281-3289 - skipped (9 entries)

SEQ ID NO: 3290 - DNA, 21 bp, Artificial Sequence
  Description of Artificial Sequence: Synthetic oligonucleotide
atagtttctctgcgttgcagt

SEQ ID NO: 3291-3299 - skipped (9 entries)

SEQ ID NO: 3300 - DNA, 21 bp, Artificial Sequence
  Description of Artificial Sequence: Synthetic oligonucleotide
aaaagtattacctttaatagt

SEQ ID NO: 3301-3309 - skipped (9 entries)

SEQ ID NO: 3310 - DNA, 21 bp, Artificial Sequence
  Description of Artificial Sequence: Synthetic oligonucleotide
atatttaaaaagtattacctt

SEQ ID NO: 3311-3319 - skipped (9 entries)

SEQ ID NO: 3320 - DNA, 21 bp, Artificial Sequence
  Description of Artificial Sequence: Synthetic oligonucleotide
aaaatgccgaattgcgaaaca

SEQ ID NO: 3321-3329 - skipped (9 entries)

SEQ ID NO: 3330 - DNA, 21 bp, Artificial Sequence
  Description of Artificial Sequence: Synthetic oligonucleotide
ttttcaaaatgccgaattgcg

SEQ ID NO: 3331-3339 - skipped (9 entries)

SEQ ID NO: 3340 - DNA, 21 bp, Artificial Sequence
  Description of Artificial Sequence: Synthetic oligonucleotide
cacggcaaatttgttttcaaa

SEQ ID NO: 3341-3349 - skipped (9 entries)

SEQ ID NO: 3350 - DNA, 21 bp, Artificial Sequence
  Description of Artificial Sequence: Synthetic oligonucleotide
ttgactgttcaagaacaaatt

SEQ ID NO: 3351-3359 - skipped (9 entries)

SEQ ID NO: 3360 - DNA, 21 bp, Artificial Sequence
  Description of Artificial Sequence: Synthetic oligonucleotide
cttttctcccagctcctgccc

SEQ ID NO: 3361-3369 - skipped (9 entries)

SEQ ID NO: 3370 - DNA, 21 bp, Artificial Sequence
  Description of Artificial Sequence: Synthetic oligonucleotide
tcccagctcctgcccctccta

SEQ ID NO: 3371-3379 - skipped (9 entries)

SEQ ID NO: 3380 - DNA, 21 bp, Artificial Sequence
  Description of Artificial Sequence: Synthetic oligonucleotide
cctctcccaggcttgaccact

SEQ ID NO: 3381-3389 - skipped (9 entries)

SEQ ID NO: 3390 - DNA, 21 bp, Artificial Sequence
  Description of Artificial Sequence: Synthetic oligonucleotide
tttttcagattgggatcatct

SEQ ID NO: 3391-3399 - skipped (9 entries)

SEQ ID NO: 3400 - DNA, 21 bp, Artificial Sequence
  Description of Artificial Sequence: Synthetic oligonucleotide
taggaaggaaacttactttgt

SEQ ID NO: 3401-3409 - skipped (9 entries)

SEQ ID NO: 3410 - DNA, 21 bp, Artificial Sequence
  Description of Artificial Sequence: Synthetic oligonucleotide
gtctgggctgccaacatggta

SEQ ID NO: 3411-3419 - skipped (9 entries)

SEQ ID NO: 3420 - DNA, 21 bp, Artificial Sequence
  Description of Artificial Sequence: Synthetic oligonucleotide
tattcctgcaggcaagcaccg

SEQ ID NO: 3421-3429 - skipped (9 entries)

SEQ ID NO: 3430 - DNA, 21 bp, Artificial Sequence
  Description of Artificial Sequence: Synthetic oligonucleotide
tctgttcttctagggctacta

SEQ ID NO: 3431-3439 - skipped (9 entries)

SEQ ID NO: 3440 - DNA, 21 bp, Artificial Sequence
  Description of Artificial Sequence: Synthetic oligonucleotide
ccctctgactctctcccagtc

SEQ ID NO: 3441-3449 - skipped (9 entries)

SEQ ID NO: 3450 - DNA, 21 bp, Artificial Sequence
  Description of Artificial Sequence: Synthetic oligonucleotide
ctccttttgtaggcctatacc

SEQ ID NO: 3451-3459 - skipped (9 entries)

SEQ ID NO: 3460 - DNA, 21 bp, Artificial Sequence
  Description of Artificial Sequence: Synthetic oligonucleotide
taggcctataccattcaagga

SEQ ID NO: 3461-3469 - skipped (9 entries)

SEQ ID NO: 3470 - DNA, 21 bp, Artificial Sequence
  Description of Artificial Sequence: Synthetic oligonucleotide
ctccttgcagttgaccaagct

SEQ ID NO: 3471-3479 - skipped (9 entries)

SEQ ID NO: 3480 - DNA, 21 bp, Artificial Sequence
  Description of Artificial Sequence: Synthetic oligonucleotide
acttgtatcttaacaggcatt

SEQ ID NO: 3481-3489 - skipped (9 entries)

SEQ ID NO: 3490 - DNA, 21 bp, Artificial Sequence
  Description of Artificial Sequence: Synthetic oligonucleotide
gcaggtttggatgcatctgct

SEQ ID NO: 3491-3499 - skipped (9 entries)

SEQ ID NO: 3500 - DNA, 21 bp, Artificial Sequence
  Description of Artificial Sequence: Synthetic oligonucleotide
tttctcccttaagttgattgg

SEQ ID NO: 3501-3509 - skipped (9 entries)

SEQ ID NO: 3510 - DNA, 21 bp, Artificial Sequence
  Description of Artificial Sequence: Synthetic oligonucleotide
tcccttaagttgattggctgc

SEQ ID NO: 3511-3519 - skipped (9 entries)

SEQ ID NO: 3520 - DNA, 21 bp, Artificial Sequence
  Description of Artificial Sequence: Synthetic oligonucleotide
tgtgttacaggctttcctcgg

SEQ ID NO: 3521-3529 - skipped (9 entries)

SEQ ID NO: 3530 - DNA, 21 bp, Artificial Sequence
  Description of Artificial Sequence: Synthetic oligonucleotide
agcatgagcctgagggcttac

SEQ ID NO: 3531-3539 - skipped (9 entries)

SEQ ID NO: 3540 - DNA, 21 bp, Artificial Sequence
  Description of Artificial Sequence: Synthetic oligonucleotide
ttacctgaccacctgcaaaga

SEQ ID NO: 3541-3549 - skipped (9 entries)

SEQ ID NO: 3550 - DNA, 21 bp, Artificial Sequence
  Description of Artificial Sequence: Synthetic oligonucleotide
atcattaccccaatagccttt

SEQ ID NO: 3551-3559 - skipped (9 entries)

SEQ ID NO: 3560 - DNA, 21 bp, Artificial Sequence
  Description of Artificial Sequence: Synthetic oligonucleotide
tcttcctcagactgctgagaa

SEQ ID NO: 3561-3569 - skipped (9 entries)

SEQ ID NO: 3570 - DNA, 21 bp, Artificial Sequence
  Description of Artificial Sequence: Synthetic oligonucleotide
ctaggccgtttgagcaaggaa

SEQ ID NO: 3571-3579 - skipped (9 entries)

SEQ ID NO: 3580 - DNA, 21 bp, Artificial Sequence
  Description of Artificial Sequence: Synthetic oligonucleotide
tttcctaggccgtttgagcaa

SEQ ID NO: 3581-3589 - skipped (9 entries)

SEQ ID NO: 3590 - DNA, 21 bp, Artificial Sequence
  Description of Artificial Sequence: Synthetic oligonucleotide
atcagcactgaaaccaacctg

SEQ ID NO: 3591-3599 - skipped (9 entries)

SEQ ID NO: 3600 - DNA, 21 bp, Artificial Sequence
  Description of Artificial Sequence: Synthetic oligonucleotide
agttggctggatctattattg

SEQ ID NO: 3601-3609 - skipped (9 entries)

SEQ ID NO: 3610 - DNA, 21 bp, Artificial Sequence
  Description of Artificial Sequence: Synthetic oligonucleotide
aaaaatcttttcagttggctg

SEQ ID NO: 3611-3619 - skipped (9 entries)

SEQ ID NO: 3620 - DNA, 21 bp, Artificial Sequence
  Description of Artificial Sequence: Synthetic oligonucleotide
aatcagattattcctatgcag

SEQ ID NO: 3621-3629 - skipped (9 entries)

SEQ ID NO: 3630 - DNA, 21 bp, Artificial Sequence
  Description of Artificial Sequence: Synthetic oligonucleotide
tgtttttagggtggctccgga

SEQ ID NO: 3631-3639 - skipped (9 entries)

SEQ ID NO: 3640 - DNA, 21 bp, Artificial Sequence
  Description of Artificial Sequence: Synthetic oligonucleotide
tttctgtttttagggtggctc

SEQ ID NO: 3641-3649 - skipped (9 entries)

SEQ ID NO: 3650 - DNA, 21 bp, Artificial Sequence
  Description of Artificial Sequence: Synthetic oligonucleotide
tctctaacaggttggtttcag

SEQ ID NO: 3651-3659 - skipped (9 entries)

SEQ ID NO: 3660 - DNA, 21 bp, Artificial Sequence
  Description of Artificial Sequence: Synthetic oligonucleotide
tctcttactatagattgctta

SEQ ID NO: 3661-3669 - skipped (9 entries)

SEQ ID NO: 3670 - DNA, 21 bp, Artificial Sequence
  Description of Artificial Sequence: Synthetic oligonucleotide
cattggtttcttgaatagctt

SEQ ID NO: 3671-3679 - skipped (9 entries)

SEQ ID NO: 3680 - DNA, 21 bp, Artificial Sequence
  Description of Artificial Sequence: Synthetic oligonucleotide
ttgaatagcttctcaataggt

SEQ ID NO: 3681-3689 - skipped (9 entries)

SEQ ID NO: 3690 - DNA, 21 bp, Artificial Sequence
  Description of Artificial Sequence: Synthetic oligonucleotide
tgtagctccagctaggatgat

SEQ ID NO: 3691-3699 - skipped (9 entries)

SEQ ID NO: 3700 - DNA, 21 bp, Artificial Sequence
  Description of Artificial Sequence: Synthetic oligonucleotide
ccttaactgctctgcgcccag

SEQ ID NO: 3701-3709 - skipped (9 entries)

SEQ ID NO: 3710 - DNA, 21 bp, Artificial Sequence
  Description of Artificial Sequence: Synthetic oligonucleotide
ttaggtacacgatttttaagg

SEQ ID NO: 3711-3719 - skipped (9 entries)

SEQ ID NO: 3720 - DNA, 21 bp, Artificial Sequence
  Description of Artificial Sequence: Synthetic oligonucleotide
cttcagatgaaatccacgatg

SEQ ID NO: 3721-3729 - skipped (9 entries)

SEQ ID NO: 3730 - DNA, 21 bp, Artificial Sequence
  Description of Artificial Sequence: Synthetic oligonucleotide
gacaaggtcattgtgccctgc

SEQ ID NO: 3731-3739 - skipped (9 entries)

SEQ ID NO: 3740 - DNA, 21 bp, Artificial Sequence
  Description of Artificial Sequence: Synthetic oligonucleotide
agatgtggctggtcatggaag

SEQ ID NO: 3741-3749 - skipped (9 entries)

SEQ ID NO: 3750 - DNA, 21 bp, Artificial Sequence
  Description of Artificial Sequence: Synthetic oligonucleotide
ttgtactcgccgacggcaaag

SEQ ID NO: 3751-3759 - skipped (9 entries)

SEQ ID NO: 3760 - DNA, 21 bp, Artificial Sequence
  Description of Artificial Sequence: Synthetic oligonucleotide
cagatctacgctgtgccttgg

SEQ ID NO: 3761-3769 - skipped (9 entries)

SEQ ID NO: 3770 - DNA, 21 bp, Artificial Sequence
  Description of Artificial Sequence: Synthetic oligonucleotide
acagaaagcattctgctcttt

SEQ ID NO: 3771-3779 - skipped (9 entries)

SEQ ID NO: 3780 - DNA, 21 bp, Artificial Sequence
  Description of Artificial Sequence: Synthetic oligonucleotide
ctttcacagaaagcattctgc

SEQ ID NO: 3781-3789 - skipped (9 entries)

SEQ ID NO: 3790 - DNA, 21 bp, Artificial Sequence
  Description of Artificial Sequence: Synthetic oligonucleotide
acatgtgtagatcgtagctgg

SEQ ID NO: 3791-3799 - skipped (9 entries)

SEQ ID NO: 3800 - DNA, 21 bp, Artificial Sequence
  Description of Artificial Sequence: Synthetic oligonucleotide
ccgtcggcgagtacaacaaag

SEQ ID NO: 3801-3809 - skipped (9 entries)

SEQ ID NO: 3810 - DNA, 21 bp, Artificial Sequence
  Description of Artificial Sequence: Synthetic oligonucleotide
tcaccaagagcgagaaccctg

SEQ ID NO: 3811-3819 - skipped (9 entries)

SEQ ID NO: 3820 - DNA, 21 bp, Artificial Sequence
  Description of Artificial Sequence: Synthetic oligonucleotide
ttacagtcgtgtctgttcaaa

SEQ ID NO: 3821-3829 - skipped (9 entries)

SEQ ID NO: 3830 - DNA, 21 bp, Artificial Sequence
  Description of Artificial Sequence: Synthetic oligonucleotide
tactgtacatgcttccttttt

SEQ ID NO: 3831-3839 - skipped (9 entries)

SEQ ID NO: 3840 - DNA, 21 bp, Artificial Sequence
  Description of Artificial Sequence: Synthetic oligonucleotide
caaatgacattatctgagagc

SEQ ID NO: 3841-3849 - skipped (9 entries)

SEQ ID NO: 3850 - DNA, 21 bp, Artificial Sequence
  Description of Artificial Sequence: Synthetic oligonucleotide
ctcacgtggcacagcactccg

SEQ ID NO: 3851-3859 - skipped (9 entries)

SEQ ID NO: 3860 - DNA, 21 bp, Artificial Sequence
  Description of Artificial Sequence: Synthetic oligonucleotide
tgtgggaaccatacctttagg

SEQ ID NO: 3861-3869 - skipped (9 entries)

SEQ ID NO: 3870 - DNA, 21 bp, Artificial Sequence
  Description of Artificial Sequence: Synthetic oligonucleotide
taaaaaggaagcatgtacagt

SEQ ID NO: 3871-3879 - skipped (9 entries)

SEQ ID NO: 3880 - DNA, 21 bp, Artificial Sequence
  Description of Artificial Sequence: Synthetic oligonucleotide
tcctatggcaggtcctcatag

SEQ ID NO: 3881-3889 - skipped (9 entries)

SEQ ID NO: 3890 - DNA, 21 bp, Artificial Sequence
  Description of Artificial Sequence: Synthetic oligonucleotide
tagctggtgccgacaagaaag

SEQ ID NO: 3891-3899 - skipped (9 entries)

SEQ ID NO: 3900 - DNA, 21 bp, Artificial Sequence
  Description of Artificial Sequence: Synthetic oligonucleotide
actttctagctggtgccgaca

SEQ ID NO: 3901-3909 - skipped (9 entries)

SEQ ID NO: 3910 - DNA, 21 bp, Artificial Sequence
  Description of Artificial Sequence: Synthetic oligonucleotide
cataggtctggagggtgagcg

SEQ ID NO: 3911-3919 - skipped (9 entries)

SEQ ID NO: 3920 - DNA, 21 bp, Artificial Sequence
  Description of Artificial Sequence: Synthetic oligonucleotide
atttacataggtctggagggt

SEQ ID NO: 3921-3929 - skipped (9 entries)

SEQ ID NO: 3930 - DNA, 21 bp, Artificial Sequence
  Description of Artificial Sequence: Synthetic oligonucleotide
tgccttacagtctctcaagtc

SEQ ID NO: 3931-3939 - skipped (9 entries)

SEQ ID NO: 3940 - DNA, 21 bp, Artificial Sequence
  Description of Artificial Sequence: Synthetic oligonucleotide
ttaccagtcacaagtaataag

SEQ ID NO: 3941-3949 - skipped (9 entries)

SEQ ID NO: 3950 - DNA, 21 bp, Artificial Sequence
  Description of Artificial Sequence: Synthetic oligonucleotide
gaaatatgagattacggagca

SEQ ID NO: 3951-3959 - skipped (9 entries)

SEQ ID NO: 3960 - DNA, 21 bp, Artificial Sequence
  Description of Artificial Sequence: Synthetic oligonucleotide
tttagaaatatgagattacgg

SEQ ID NO: 3961-3969 - skipped (9 entries)

SEQ ID NO: 3970 - DNA, 21 bp, Artificial Sequence
  Description of Artificial Sequence: Synthetic oligonucleotide
tctttatttagaaatatgaga

SEQ ID NO: 3971-3979 - skipped (9 entries)

SEQ ID NO: 3980 - DNA, 21 bp, Artificial Sequence
  Description of Artificial Sequence: Synthetic oligonucleotide
attttctctttatttagaaat

SEQ ID NO: 3981-3989 - skipped (9 entries)

SEQ ID NO: 3990 - DNA, 21 bp, Artificial Sequence
  Description of Artificial Sequence: Synthetic oligonucleotide
ccccttaggacctctggtcct

SEQ ID NO: 3991-3999 - skipped (9 entries)

SEQ ID NO: 4000 - DNA, 21 bp, Artificial Sequence
  Description of Artificial Sequence: Synthetic oligonucleotide
acttacagagggtggttttcc

SEQ ID NO: 4001-4009 - skipped (9 entries)

SEQ ID NO: 4010 - DNA, 21 bp, Artificial Sequence
  Description of Artificial Sequence: Synthetic oligonucleotide
tttttaacttacagagggtgg

SEQ ID NO: 4011-4019 - skipped (9 entries)

SEQ ID NO: 4020 - DNA, 21 bp, Artificial Sequence
  Description of Artificial Sequence: Synthetic oligonucleotide
tgtaggtattggcaagcttgc

SEQ ID NO: 4021-4029 - skipped (9 entries)

SEQ ID NO: 4030 - DNA, 21 bp, Artificial Sequence
  Description of Artificial Sequence: Synthetic oligonucleotide
acactggctgcccggcaggcc

SEQ ID NO: 4031-4039 - skipped (9 entries)

SEQ ID NO: 4040 - DNA, 21 bp, Artificial Sequence
  Description of Artificial Sequence: Synthetic oligonucleotide
tgtgtaggttacgttatatat

SEQ ID NO: 4041-4049 - skipped (9 entries)

SEQ ID NO: 4050 - DNA, 21 bp, Artificial Sequence
  Description of Artificial Sequence: Synthetic oligonucleotide
ctattctaggagcgagctgga

SEQ ID NO: 4051-4059 - skipped (9 entries)

SEQ ID NO: 4060 - DNA, 21 bp, Artificial Sequence
  Description of Artificial Sequence: Synthetic oligonucleotide
cctctgcaacggactgaaggc

SEQ ID NO: 4061-4069 - skipped (9 entries)

SEQ ID NO: 4070 - DNA, 21 bp, Artificial Sequence
  Description of Artificial Sequence: Synthetic oligonucleotide
ctggccggtcacctcgaaggt

SEQ ID NO: 4071-4079 - skipped (9 entries)

SEQ ID NO: 4080 - DNA, 21 bp, Artificial Sequence
  Description of Artificial Sequence: Synthetic oligonucleotide
cctgtaggctcatgtagcctc

SEQ ID NO: 4081-4089 - skipped (9 entries)

SEQ ID NO: 4090 - DNA, 21 bp, Artificial Sequence
  Description of Artificial Sequence: Synthetic oligonucleotide
ctcagtcgccaatatgcagct

SEQ ID NO: 4091-4099 - skipped (9 entries)

SEQ ID NO: 4100 - DNA, 21 bp, Artificial Sequence
  Description of Artificial Sequence: Synthetic oligonucleotide
tttactcagtcgccaatatgc

SEQ ID NO: 4101-4109 - skipped (9 entries)

SEQ ID NO: 4110 - DNA, 21 bp, Artificial Sequence
  Description of Artificial Sequence: Synthetic oligonucleotide
ccccctagcgtctgaccaaac

SEQ ID NO: 4111-4119 - skipped (9 entries)

SEQ ID NO: 4120 - DNA, 21 bp, Artificial Sequence
  Description of Artificial Sequence: Synthetic oligonucleotide
ccccgtacgagcggcgcgcca

SEQ ID NO: 4121-4129 - skipped (9 entries)

SEQ ID NO: 4130 - DNA, 21 bp, Artificial Sequence
  Description of Artificial Sequence: Synthetic oligonucleotide
ctagtatacctcttcctcttc

SEQ ID NO: 4131-4139 - skipped (9 entries)

SEQ ID NO: 4140 - DNA, 21 bp, Artificial Sequence
  Description of Artificial Sequence: Synthetic oligonucleotide
ctcaccttggcttccccaaaa

SEQ ID NO: 4141-4149 - skipped (9 entries)

SEQ ID NO: 4150 - DNA, 21 bp, Artificial Sequence
  Description of Artificial Sequence: Synthetic oligonucleotide
aaatcttaccttccgtgcctt

SEQ ID NO: 4151-4159 - skipped (9 entries)

SEQ ID NO: 4160 - DNA, 21 bp, Artificial Sequence
  Description of Artificial Sequence: Synthetic oligonucleotide
tctgttacaggaattaacaat

SEQ ID NO: 4161-4169 - skipped (9 entries)

SEQ ID NO: 4170 - DNA, 21 bp, Artificial Sequence
  Description of Artificial Sequence: Synthetic oligonucleotide
cctctcatctctcaggtcgat

SEQ ID NO: 4171-4179 - skipped (9 entries)

SEQ ID NO: 4180 - DNA, 21 bp, Artificial Sequence
  Description of Artificial Sequence: Synthetic oligonucleotide
taccctgtagatcgaagattt

SEQ ID NO: 4181-4189 - skipped (9 entries)

SEQ ID NO: 4190 - DNA, 21 bp, Artificial Sequence
  Description of Artificial Sequence: Synthetic oligonucleotide
ggctatgtccaaactgggtct

SEQ ID NO: 4191-4199 - skipped (9 entries)

SEQ ID NO: 4200 - DNA, 21 bp, Artificial Sequence
  Description of Artificial Sequence: Synthetic oligonucleotide
tcttctttaggctatgtccaa

SEQ ID NO: 4201-4209 - skipped (9 entries)

SEQ ID NO: 4210 - DNA, 21 bp, Artificial Sequence
  Description of Artificial Sequence: Synthetic oligonucleotide
tcttcttagctggcggcagca

SEQ ID NO: 4211-4219 - skipped (9 entries)

SEQ ID NO: 4220 - DNA, 21 bp, Artificial Sequence
  Description of Artificial Sequence: Synthetic oligonucleotide
gacatcaggcttgatggtatc

SEQ ID NO: 4221-4229 - skipped (9 entries)

SEQ ID NO: 4230 - DNA, 21 bp, Artificial Sequence
  Description of Artificial Sequence: Synthetic oligonucleotide
ccatgctagatgacagaagtg

SEQ ID NO: 4231-4239 - skipped (9 entries)

SEQ ID NO: 4240 - DNA, 21 bp, Artificial Sequence
  Description of Artificial Sequence: Synthetic oligonucleotide
ttaaattcttctgccctatca

SEQ ID NO: 4241-4249 - skipped (9 entries)

SEQ ID NO: 4250 - DNA, 21 bp, Artificial Sequence
  Description of Artificial Sequence: Synthetic oligonucleotide
tcttgcagtgtgcccagctgg

SEQ ID NO: 4251-4259 - skipped (9 entries)

SEQ ID NO: 4260 - DNA, 21 bp, Artificial Sequence
  Description of Artificial Sequence: Synthetic oligonucleotide
tcattgatgataagggtattc

SEQ ID NO: 4261-4269 - skipped (9 entries)

SEQ ID NO: 4270 - DNA, 21 bp, Artificial Sequence
  Description of Artificial Sequence: Synthetic oligonucleotide
ccaggggcctttttatcattg

SEQ ID NO: 4271-4279 - skipped (9 entries)

SEQ ID NO: 4280 - DNA, 21 bp, Artificial Sequence
  Description of Artificial Sequence: Synthetic oligonucleotide
atctcttttcccaggggcctt

SEQ ID NO: 4281-4289 - skipped (9 entries)

SEQ ID NO: 4290 - DNA, 21 bp, Artificial Sequence
  Description of Artificial Sequence: Synthetic oligonucleotide
ctttcatctcttttcccaggg

SEQ ID NO: 4291-4299 - skipped (9 entries)

SEQ ID NO: 4300 - DNA, 21 bp, Artificial Sequence
  Description of Artificial Sequence: Synthetic oligonucleotide
gtatcagacccgaagcgcacc

SEQ ID NO: 4301-4309 - skipped (9 entries)

SEQ ID NO: 4310 - DNA, 21 bp, Artificial Sequence
  Description of Artificial Sequence: Synthetic oligonucleotide
ccatagggtcaatacacctaa

SEQ ID NO: 4311-4319 - skipped (9 entries)

SEQ ID NO: 4320 - DNA, 21 bp, Artificial Sequence
  Description of Artificial Sequence: Synthetic oligonucleotide
ccttttgccatagggtcaata

SEQ ID NO: 4321-4329 - skipped (9 entries)

SEQ ID NO: 4330 - DNA, 21 bp, Artificial Sequence
  Description of Artificial Sequence: Synthetic oligonucleotide
agtgatagggcagaagaattt

SEQ ID NO: 4331-4339 - skipped (9 entries)

SEQ ID NO: 4340 - DNA, 21 bp, Artificial Sequence
  Description of Artificial Sequence: Synthetic oligonucleotide
ccctcttgacttcacctttgt

SEQ ID NO: 4341-4349 - skipped (9 entries)

SEQ ID NO: 4350 - DNA, 21 bp, Artificial Sequence
  Description of Artificial Sequence: Synthetic oligonucleotide
cccccaggaaaatatgttgtg

SEQ ID NO: 4351-4359 - skipped (9 entries)

SEQ ID NO: 4360 - DNA, 21 bp, Artificial Sequence
  Description of Artificial Sequence: Synthetic oligonucleotide
ccttctcggtcacatactggc

SEQ ID NO: 4361-4369 - skipped (9 entries)

SEQ ID NO: 4370 - DNA, 21 bp, Artificial Sequence
  Description of Artificial Sequence: Synthetic oligonucleotide
gcccagtccaaggtaacttta

SEQ ID NO: 4371-4379 - skipped (9 entries)

SEQ ID NO: 4380 - DNA, 21 bp, Artificial Sequence
  Description of Artificial Sequence: Synthetic oligonucleotide
tttccatcaatttcaccgtct

SEQ ID NO: 4381-4389 - skipped (9 entries)

SEQ ID NO: 4390 - DNA, 21 bp, Artificial Sequence
  Description of Artificial Sequence: Synthetic oligonucleotide
catcaatttcaccgtcttcca

SEQ ID NO: 4391-4399 - skipped (9 entries)

SEQ ID NO: 4400 - DNA, 21 bp, Artificial Sequence
  Description of Artificial Sequence: Synthetic oligonucleotide
accgtcttccatggcctcctt

SEQ ID NO: 4401-4409 - skipped (9 entries)

SEQ ID NO: 4410 - DNA, 21 bp, Artificial Sequence
  Description of Artificial Sequence: Synthetic oligonucleotide
gcatcctcctcactgttgaag

SEQ ID NO: 4411-4419 - skipped (9 entries)

SEQ ID NO: 4420 - DNA, 21 bp, Artificial Sequence
  Description of Artificial Sequence: Synthetic oligonucleotide
gaggacccagtttcccggtca

SEQ ID NO: 4421-4429 - skipped (9 entries)

SEQ ID NO: 4430 - DNA, 21 bp, Artificial Sequence
  Description of Artificial Sequence: Synthetic oligonucleotide
ccggtcagtaactatccttgc

SEQ ID NO: 4431-4439 - skipped (9 entries)

SEQ ID NO: 4440 - DNA, 21 bp, Artificial Sequence
  Description of Artificial Sequence: Synthetic oligonucleotide
atgtctcttcagtggtatcct

SEQ ID NO: 4441-4449 - skipped (9 entries)

SEQ ID NO: 4450 - DNA, 21 bp, Artificial Sequence
  Description of Artificial Sequence: Synthetic oligonucleotide
acaaacagagttttggatggc

SEQ ID NO: 4451-4459 - skipped (9 entries)

SEQ ID NO: 4460 - DNA, 21 bp, Artificial Sequence
  Description of Artificial Sequence: Synthetic oligonucleotide
gtggcagaggccggggaggct

SEQ ID NO: 4461-4469 - skipped (9 entries)

SEQ ID NO: 4470 - DNA, 21 bp, Artificial Sequence
  Description of Artificial Sequence: Synthetic oligonucleotide
gaggacgaggtggtggtagag

SEQ ID NO: 4471-4479 - skipped (9 entries)

SEQ ID NO: 4480 - DNA, 21 bp, Artificial Sequence
  Description of Artificial Sequence: Synthetic oligonucleotide
tagacttcaacagtgaggagg

SEQ ID NO: 4481-4489 - skipped (9 entries)

SEQ ID NO: 4490 - DNA, 21 bp, Artificial Sequence
  Description of Artificial Sequence: Synthetic oligonucleotide
gttttgtagacttcaacagtg

SEQ ID NO: 4491-4499 - skipped (9 entries)

SEQ ID NO: 4500 - DNA, 21 bp, Artificial Sequence
  Description of Artificial Sequence: Synthetic oligonucleotide
gtgttctaggtttggttttgt

SEQ ID NO: 4501-4509 - skipped (9 entries)

SEQ ID NO: 4510 - DNA, 21 bp, Artificial Sequence
  Description of Artificial Sequence: Synthetic oligonucleotide
atttggtgttctaggtttggt

SEQ ID NO: 4511-4519 - skipped (9 entries)

SEQ ID NO: 4520 - DNA, 21 bp, Artificial Sequence
  Description of Artificial Sequence: Synthetic oligonucleotide
acggctccgttcgggcaagga

SEQ ID NO: 4521-4529 - skipped (9 entries)

SEQ ID NO: 4530 - DNA, 21 bp, Artificial Sequence
  Description of Artificial Sequence: Synthetic oligonucleotide
tcaaaggcctgtctgaggata

SEQ ID NO: 4531-4539 - skipped (9 entries)

SEQ ID NO: 4540 - DNA, 21 bp, Artificial Sequence
  Description of Artificial Sequence: Synthetic oligonucleotide
cttcccagagccatccaaaac

SEQ ID NO: 4541-4549 - skipped (9 entries)

SEQ ID NO: 4550 - DNA, 21 bp, Artificial Sequence
  Description of Artificial Sequence: Synthetic oligonucleotide
tagatgaaagaaacaatcatg

SEQ ID NO: 4551-4559 - skipped (9 entries)

SEQ ID NO: 4560 - DNA, 21 bp, Artificial Sequence
  Description of Artificial Sequence: Synthetic oligonucleotide
ctcttctccctgactttaggg

SEQ ID NO: 4561-4569 - skipped (9 entries)

SEQ ID NO: 4570 - DNA, 21 bp, Artificial Sequence
  Description of Artificial Sequence: Synthetic oligonucleotide
gggaactgctcgcagaaagaa

SEQ ID NO: 4571-4579 - skipped (9 entries)

SEQ ID NO: 4580 - DNA, 21 bp, Artificial Sequence
  Description of Artificial Sequence: Synthetic oligonucleotide
ttttcttaataggtgaatatg

SEQ ID NO: 4581-4589 - skipped (9 entries)

SEQ ID NO: 4590 - DNA, 21 bp, Artificial Sequence
  Description of Artificial Sequence: Synthetic oligonucleotide
ttaataggtgaatatgtttac

SEQ ID NO: 4591-4599 - skipped (9 entries)

SEQ ID NO: 4600 - DNA, 21 bp, Artificial Sequence
  Description of Artificial Sequence: Synthetic oligonucleotide
cattttcctttcatagctgtg

SEQ ID NO: 4601-4609 - skipped (9 entries)

SEQ ID NO: 4610 - DNA, 21 bp, Artificial Sequence
  Description of Artificial Sequence: Synthetic oligonucleotide
ctttcatagctgtggatggaa

SEQ ID NO: 4611-4619 - skipped (9 entries)

SEQ ID NO: 4620 - DNA, 21 bp, Artificial Sequence
  Description of Artificial Sequence: Synthetic oligonucleotide
atagctgtggatggaaaagca

SEQ ID NO: 4621-4629 - skipped (9 entries)

SEQ ID NO: 4630 - DNA, 21 bp, Artificial Sequence
  Description of Artificial Sequence: Synthetic oligonucleotide
tactcttttccttttcctaga

SEQ ID NO: 4631-4639 - skipped (9 entries)

SEQ ID NO: 4640 - DNA, 21 bp, Artificial Sequence
  Description of Artificial Sequence: Synthetic oligonucleotide
cttttcctagatcttgtggag

SEQ ID NO: 4641-4649 - skipped (9 entries)

SEQ ID NO: 4650 - DNA, 21 bp, Artificial Sequence
  Description of Artificial Sequence: Synthetic oligonucleotide
ctagatcttgtggagaatttt

SEQ ID NO: 4651-4659 - skipped (9 entries)

SEQ ID NO: 4660 - DNA, 21 bp, Artificial Sequence
  Description of Artificial Sequence: Synthetic oligonucleotide
atacttgcctcttcaatacca

SEQ ID NO: 4661-4669 - skipped (9 entries)

SEQ ID NO: 4670 - DNA, 21 bp, Artificial Sequence
  Description of Artificial Sequence: Synthetic oligonucleotide
ggggctatcattgtagtgagt

SEQ ID NO: 4671-4679 - skipped (9 entries)

SEQ ID NO: 4680 - DNA, 21 bp, Artificial Sequence
  Description of Artificial Sequence: Synthetic oligonucleotide
agcccatcaaggcagacccca

SEQ ID NO: 4681-4689 - skipped (9 entries)

SEQ ID NO: 4690 - DNA, 21 bp, Artificial Sequence
  Description of Artificial Sequence: Synthetic oligonucleotide
agttttggaactccccaaaga

SEQ ID NO: 4691-4699 - skipped (9 entries)

SEQ ID NO: 4700 - DNA, 21 bp, Artificial Sequence
  Description of Artificial Sequence: Synthetic oligonucleotide
gaactccccaaagagctgtca

SEQ ID NO: 4701-4709 - skipped (9 entries)

SEQ ID NO: 4710 - DNA, 21 bp, Artificial Sequence
  Description of Artificial Sequence: Synthetic oligonucleotide
cccctctgcttcgtctttctc

SEQ ID NO: 4711-4719 - skipped (9 entries)

SEQ ID NO: 4720 - DNA, 21 bp, Artificial Sequence
  Description of Artificial Sequence: Synthetic oligonucleotide
tccacccccgggagaccacga

SEQ ID NO: 4721-4729 - skipped (9 entries)

SEQ ID NO: 4730 - DNA, 21 bp, Artificial Sequence
  Description of Artificial Sequence: Synthetic oligonucleotide
atgtgcctgttctcaacctct

SEQ ID NO: 4731-4739 - skipped (9 entries)

SEQ ID NO: 4740 - DNA, 21 bp, Artificial Sequence
  Description of Artificial Sequence: Synthetic oligonucleotide
tgacagctctttggggagttc

SEQ ID NO: 4741-4749 - skipped (9 entries)

SEQ ID NO: 4750 - DNA, 21 bp, Artificial Sequence
  Description of Artificial Sequence: Synthetic oligonucleotide
actaagcttaattgctttctg

SEQ ID NO: 4751-4759 - skipped (9 entries)

SEQ ID NO: 4760 - DNA, 21 bp, Artificial Sequence
  Description of Artificial Sequence: Synthetic oligonucleotide
tggaacaggatctgaaactgg

SEQ ID NO: 4761-4769 - skipped (9 entries)

SEQ ID NO: 4770 - DNA, 21 bp, Artificial Sequence
  Description of Artificial Sequence: Synthetic oligonucleotide
tacccatcaacactggtaaga

SEQ ID NO: 4771-4779 - skipped (9 entries)

SEQ ID NO: 4780 - DNA, 21 bp, Artificial Sequence
  Description of Artificial Sequence: Synthetic oligonucleotide
ttcttttaggatgtggatgta

SEQ ID NO: 4781-4789 - skipped (9 entries)

SEQ ID NO: 4790 - DNA, 21 bp, Artificial Sequence
  Description of Artificial Sequence: Synthetic oligonucleotide
ggatgtggatgtagaagaggc

SEQ ID NO: 4791-4799 - skipped (9 entries)

SEQ ID NO: 4800 - DNA, 21 bp, Artificial Sequence
  Description of Artificial Sequence: Synthetic oligonucleotide
ccgccttaaatccacagcata

SEQ ID NO: 4801-4809 - skipped (9 entries)

SEQ ID NO: 4810 - DNA, 21 bp, Artificial Sequence
  Description of Artificial Sequence: Synthetic oligonucleotide
attaagttctagattttgtgc

SEQ ID NO: 4811-4819 - skipped (9 entries)

SEQ ID NO: 4820 - DNA, 21 bp, Artificial Sequence
  Description of Artificial Sequence: Synthetic oligonucleotide
tggtttcattaagttctagat

SEQ ID NO: 4821-4829 - skipped (9 entries)

SEQ ID NO: 4830 - DNA, 21 bp, Artificial Sequence
  Description of Artificial Sequence: Synthetic oligonucleotide
agatcctgttccagaaagcaa

SEQ ID NO: 4831-4839 - skipped (9 entries)

SEQ ID NO: 4840 - DNA, 21 bp, Artificial Sequence
  Description of Artificial Sequence: Synthetic oligonucleotide
aagtacctgttgggatatcca

SEQ ID NO: 4841-4849 - skipped (9 entries)

SEQ ID NO: 4850 - DNA, 21 bp, Artificial Sequence
  Description of Artificial Sequence: Synthetic oligonucleotide
tcttttaaagtacctgttggg

SEQ ID NO: 4851-4859 - skipped (9 entries)

SEQ ID NO: 4860 - DNA, 21 bp, Artificial Sequence
  Description of Artificial Sequence: Synthetic oligonucleotide
agctgatcaaggagatgttca

SEQ ID NO: 4861-4869 - skipped (9 entries)

SEQ ID NO: 4870 - DNA, 21 bp, Artificial Sequence
  Description of Artificial Sequence: Synthetic oligonucleotide
cttttcagctgatcaaggaga

SEQ ID NO: 4871-4879 - skipped (9 entries)

SEQ ID NO: 4880 - DNA, 21 bp, Artificial Sequence
  Description of Artificial Sequence: Synthetic oligonucleotide
gcatcattaacagctcaggct

SEQ ID NO: 4881-4889 - skipped (9 entries)

SEQ ID NO: 4890 - DNA, 21 bp, Artificial Sequence
  Description of Artificial Sequence: Synthetic oligonucleotide
tgaacagtttagcatcattaa

SEQ ID NO: 4891-4899 - skipped (9 entries)

SEQ ID NO: 4900 - DNA, 21 bp, Artificial Sequence
  Description of Artificial Sequence: Synthetic oligonucleotide
ttgttttctgaacagtttagc

SEQ ID NO: 4901-4909 - skipped (9 entries)

SEQ ID NO: 4910 - DNA, 21 bp, Artificial Sequence
  Description of Artificial Sequence: Synthetic oligonucleotide
ccggaattgtctcttctttgt

SEQ ID NO: 4911-4919 - skipped (9 entries)

SEQ ID NO: 4920 - DNA, 21 bp, Artificial Sequence
  Description of Artificial Sequence: Synthetic oligonucleotide
aatttaccggaattgtctctt

SEQ ID NO: 4921-4929 - skipped (9 entries)

SEQ ID NO: 4930 - DNA, 21 bp, Artificial Sequence
  Description of Artificial Sequence: Synthetic oligonucleotide
tcttttccatgtgatttttta

SEQ ID NO: 4931-4939 - skipped (9 entries)

SEQ ID NO: 4940 - DNA, 21 bp, Artificial Sequence
  Description of Artificial Sequence: Synthetic oligonucleotide
tttgtcttttccatgtgattt

SEQ ID NO: 4941-4949 - skipped (9 entries)

SEQ ID NO: 4950 - DNA, 21 bp, Artificial Sequence
  Description of Artificial Sequence: Synthetic oligonucleotide
gacctctccagtgtgttaatg

SEQ ID NO: 4951-4959 - skipped (9 entries)

SEQ ID NO: 4960 - DNA, 21 bp, Artificial Sequence
  Description of Artificial Sequence: Synthetic oligonucleotide
ttccactttagacctctccag

SEQ ID NO: 4961-4969 - skipped (9 entries)

SEQ ID NO: 4970 - DNA, 21 bp, Artificial Sequence
  Description of Artificial Sequence: Synthetic oligonucleotide
taaccaagtgctctgtagttt

SEQ ID NO: 4971-4979 - skipped (9 entries)

SEQ ID NO: 4980 - DNA, 21 bp, Artificial Sequence
  Description of Artificial Sequence: Synthetic oligonucleotide
tcttctaggtctataagaagg

SEQ ID NO: 4981-4989 - skipped (9 entries)

SEQ ID NO: 4990 - DNA, 21 bp, Artificial Sequence
  Description of Artificial Sequence: Synthetic oligonucleotide
agtaagtgttcacttacgttc

SEQ ID NO: 4991-4999 - skipped (9 entries)

SEQ ID NO: 5000 - DNA, 21 bp, Artificial Sequence
  Description of Artificial Sequence: Synthetic oligonucleotide
ccttaattcttgcttctcaga

SEQ ID NO: 5001-5009 - skipped (9 entries)

SEQ ID NO: 5010 - DNA, 21 bp, Artificial Sequence
  Description of Artificial Sequence: Synthetic oligonucleotide
agctgagcaatggacgtggac

SEQ ID NO: 5011-5019 - skipped (9 entries)

SEQ ID NO: 5020 - DNA, 21 bp, Artificial Sequence
  Description of Artificial Sequence: Synthetic oligonucleotide
aaggacttaaaggagaagaag

SEQ ID NO: 5021-5029 - skipped (9 entries)

SEQ ID NO: 5030 - DNA, 21 bp, Artificial Sequence
  Description of Artificial Sequence: Synthetic oligonucleotide
tgtcgaggagaatgaggaaaa

SEQ ID NO: 5031-5039 - skipped (9 entries)

SEQ ID NO: 5040 - DNA, 21 bp, Artificial Sequence
  Description of Artificial Sequence: Synthetic oligonucleotide
attctctccaggtgaggaaga

SEQ ID NO: 5041-5049 - skipped (9 entries)

SEQ ID NO: 5050 - DNA, 21 bp, Artificial Sequence
  Description of Artificial Sequence: Synthetic oligonucleotide
tctgcttaggatgacgatgtc

SEQ ID NO: 5051-5059 - skipped (9 entries)

SEQ ID NO: 5060 - DNA, 21 bp, Artificial Sequence
  Description of Artificial Sequence: Synthetic oligonucleotide
gcatccggagaaatgaaaaga

SEQ ID NO: 5061-5069 - skipped (9 entries)

SEQ ID NO: 5070 - DNA, 21 bp, Artificial Sequence
  Description of Artificial Sequence: Synthetic oligonucleotide
tccacaggtgcgggagtatga

SEQ ID NO: 5071-5079 - skipped (9 entries)

SEQ ID NO: 5080 - DNA, 21 bp, Artificial Sequence
  Description of Artificial Sequence: Synthetic oligonucleotide
agcatcgcagacaagaagcgc

SEQ ID NO: 5081-5089 - skipped (9 entries)

SEQ ID NO: 5090 - DNA, 21 bp, Artificial Sequence
  Description of Artificial Sequence: Synthetic oligonucleotide
agtatgatgggatcatccttc

SEQ ID NO: 5091-5099 - skipped (9 entries)

SEQ ID NO: 5100 - DNA, 21 bp, Artificial Sequence
  Description of Artificial Sequence: Synthetic oligonucleotide
cggatgcgaagttcccgcatg

SEQ ID NO: 5101-5109 - skipped (9 entries)

SEQ ID NO: 5110 - DNA, 21 bp, Artificial Sequence
  Description of Artificial Sequence: Synthetic oligonucleotide
tccggatgccaaaggatctga

SEQ ID NO: 5111-5119 - skipped (9 entries)

SEQ ID NO: 5120 - DNA, 21 bp, Artificial Sequence
  Description of Artificial Sequence: Synthetic oligonucleotide
atttctccggatgccaaagga

SEQ ID NO: 5121-5129 - skipped (9 entries)

SEQ ID NO: 5130 - DNA, 21 bp, Artificial Sequence
  Description of Artificial Sequence: Synthetic oligonucleotide
gacccttctccaagatttctt

SEQ ID NO: 5131-5139 - skipped (9 entries)

SEQ ID NO: 5140 - DNA, 21 bp, Artificial Sequence
  Description of Artificial Sequence: Synthetic oligonucleotide
ttaactcatactcccgcacct

SEQ ID NO: 5141-5149 - skipped (9 entries)

SEQ ID NO: 5150 - DNA, 21 bp, Artificial Sequence
  Description of Artificial Sequence: Synthetic oligonucleotide
ccttctgctggaaccagcgca

SEQ ID NO: 5151-5159 - skipped (9 entries)

SEQ ID NO: 5160 - DNA, 21 bp, Artificial Sequence
  Description of Artificial Sequence: Synthetic oligonucleotide
tctttttttccaacagaattt

SEQ ID NO: 5161-5169 - skipped (9 entries)

SEQ ID NO: 5170 - DNA, 21 bp, Artificial Sequence
  Description of Artificial Sequence: Synthetic oligonucleotide
caacagaatttgccattttca

SEQ ID NO: 5171-5179 - skipped (9 entries)

SEQ ID NO: 5180 - DNA, 21 bp, Artificial Sequence
  Description of Artificial Sequence: Synthetic oligonucleotide
ttgaggccctcagcactagtt

SEQ ID NO: 5181-5189 - skipped (9 entries)

SEQ ID NO: 5190 - DNA, 21 bp, Artificial Sequence
  Description of Artificial Sequence: Synthetic oligonucleotide
cggccagcaggggcatctctg

SEQ ID NO: 5191-5199 - skipped (9 entries)

SEQ ID NO: 5200 - DNA, 21 bp, Artificial Sequence
  Description of Artificial Sequence: Synthetic oligonucleotide
tgggttacttacattcatggc

SEQ ID NO: 5201-5209 - skipped (9 entries)

SEQ ID NO: 5210 - DNA, 21 bp, Artificial Sequence
  Description of Artificial Sequence: Synthetic oligonucleotide
tctgcctgcagcctgtggagc

SEQ ID NO: 5211-5219 - skipped (9 entries)

SEQ ID NO: 5220 - DNA, 21 bp, Artificial Sequence
  Description of Artificial Sequence: Synthetic oligonucleotide
ttctccctacctagccctgga

SEQ ID NO: 5221-5229 - skipped (9 entries)

SEQ ID NO: 5230 - DNA, 21 bp, Artificial Sequence
  Description of Artificial Sequence: Synthetic oligonucleotide
cattgctccttagatccacat

SEQ ID NO: 5231-5239 - skipped (9 entries)

SEQ ID NO: 5240 - DNA, 21 bp, Artificial Sequence
  Description of Artificial Sequence: Synthetic oligonucleotide
cctccccaaaaggaagagttc

SEQ ID NO: 5241-5249 - skipped (9 entries)

SEQ ID NO: 5250 - DNA, 21 bp, Artificial Sequence
  Description of Artificial Sequence: Synthetic oligonucleotide
ctgcggtaatcatgaggataa

SEQ ID NO: 5251-5259 - skipped (9 entries)

SEQ ID NO: 5260 - DNA, 21 bp, Artificial Sequence
  Description of Artificial Sequence: Synthetic oligonucleotide
agttctgggaaaatggtgtgc

SEQ ID NO: 5261-5269 - skipped (9 entries)

SEQ ID NO: 5270 - DNA, 21 bp, Artificial Sequence
  Description of Artificial Sequence: Synthetic oligonucleotide
ctttccctagtgaagaacagt

SEQ ID NO: 5271-5279 - skipped (9 entries)

SEQ ID NO: 5280 - DNA, 21 bp, Artificial Sequence
  Description of Artificial Sequence: Synthetic oligonucleotide
cctagtgaagaacagtccaga

SEQ ID NO: 5281-5289 - skipped (9 entries)

SEQ ID NO: 5290 - DNA, 21 bp, Artificial Sequence
  Description of Artificial Sequence: Synthetic oligonucleotide
cagctaagttcttggacttca

SEQ ID NO: 5291-5299 - skipped (9 entries)

SEQ ID NO: 5300 - DNA, 21 bp, Artificial Sequence
  Description of Artificial Sequence: Synthetic oligonucleotide
ctataaggttagaaggccttg

SEQ ID NO: 5301-5309 - skipped (9 entries)

SEQ ID NO: 5310 - DNA, 21 bp, Artificial Sequence
  Description of Artificial Sequence: Synthetic oligonucleotide
caattttccttctagttatga

SEQ ID NO: 5311-5319 - skipped (9 entries)

SEQ ID NO: 5320 - DNA, 21 bp, Artificial Sequence
  Description of Artificial Sequence: Synthetic oligonucleotide
cttctagttatgagccagagt

SEQ ID NO: 5321-5329 - skipped (9 entries)

SEQ ID NO: 5330 - DNA, 21 bp, Artificial Sequence
  Description of Artificial Sequence: Synthetic oligonucleotide
ctggtttaatctacagaatga

SEQ ID NO: 5331-5339 - skipped (9 entries)

SEQ ID NO: 5340 - DNA, 21 bp, Artificial Sequence
  Description of Artificial Sequence: Synthetic oligonucleotide
atctacagaatgatcaaaccc

SEQ ID NO: 5341-5349 - skipped (9 entries)

SEQ ID NO: 5350 - DNA, 21 bp, Artificial Sequence
  Description of Artificial Sequence: Synthetic oligonucleotide
tttctggaaaagttgtattaa

SEQ ID NO: 5351-5359 - skipped (9 entries)

SEQ ID NO: 5360 - DNA, 21 bp, Artificial Sequence
  Description of Artificial Sequence: Synthetic oligonucleotide
tggaaaagttgtattaacagg

SEQ ID NO: 5361-5369 - skipped (9 entries)

SEQ ID NO: 5370 - DNA, 21 bp, Artificial Sequence
  Description of Artificial Sequence: Synthetic oligonucleotide
ggtcaagtttacaaccaagat

SEQ ID NO: 5371-5379 - skipped (9 entries)

SEQ ID NO: 5380 - DNA, 21 bp, Artificial Sequence
  Description of Artificial Sequence: Synthetic oligonucleotide
gggcacgaagtgcaatggtct

SEQ ID NO: 5381-5389 - skipped (9 entries)

SEQ ID NO: 5390 - DNA, 21 bp, Artificial Sequence
  Description of Artificial Sequence: Synthetic oligonucleotide
ccagaactgaaaatcagtgcc

SEQ ID NO: 5391-5399 - skipped (9 entries)

SEQ ID NO: 5400 - DNA, 21 bp, Artificial Sequence
  Description of Artificial Sequence: Synthetic oligonucleotide
ttacggctacctcttggctcc

SEQ ID NO: 5401-5409 - skipped (9 entries)

SEQ ID NO: 5410 - DNA, 21 bp, Artificial Sequence
  Description of Artificial Sequence: Synthetic oligonucleotide
ttgctgccagtctggactgtt

SEQ ID NO: 5411-5419 - skipped (9 entries)

SEQ ID NO: 5420 - DNA, 21 bp, Artificial Sequence
  Description of Artificial Sequence: Synthetic oligonucleotide
agacttacctactaaattgtt

SEQ ID NO: 5421-5429 - skipped (9 entries)

SEQ ID NO: 5430 - DNA, 21 bp, Artificial Sequence
  Description of Artificial Sequence: Synthetic oligonucleotide
atcattctgtagattaaacca

SEQ ID NO: 5431-5439 - skipped (9 entries)

SEQ ID NO: 5440 - DNA, 21 bp, Artificial Sequence
  Description of Artificial Sequence: Synthetic oligonucleotide
cagaaacaaaaataaggagaa

SEQ ID NO: 5441-5449 - skipped (9 entries)

SEQ ID NO: 5450 - DNA, 21 bp, Artificial Sequence
  Description of Artificial Sequence: Synthetic oligonucleotide
aaatgcttcataaatttctgc

SEQ ID NO: 5451-5459 - skipped (9 entries)

SEQ ID NO: 5460 - DNA, 21 bp, Artificial Sequence
  Description of Artificial Sequence: Synthetic oligonucleotide
ctcagccagcccccaatcttc

SEQ ID NO: 5461-5469 - skipped (9 entries)

SEQ ID NO: 5470 - DNA, 21 bp, Artificial Sequence
  Description of Artificial Sequence: Synthetic oligonucleotide
tcccaatctgtgtagttagca

SEQ ID NO: 5471-5479 - skipped (9 entries)

SEQ ID NO: 5480 - DNA, 21 bp, Artificial Sequence
  Description of Artificial Sequence: Synthetic oligonucleotide
gggtaattctccatctgctgc

SEQ ID NO: 5481-5489 - skipped (9 entries)

SEQ ID NO: 5490 - DNA, 21 bp, Artificial Sequence
  Description of Artificial Sequence: Synthetic oligonucleotide
ggaattgtctttgcctgctgc

SEQ ID NO: 5491-5499 - skipped (9 entries)

SEQ ID NO: 5500 - DNA, 21 bp, Artificial Sequence
  Description of Artificial Sequence: Synthetic oligonucleotide
cttctaggttttgggaattgt

SEQ ID NO: 5501-5509 - skipped (9 entries)

SEQ ID NO: 5510 - DNA, 21 bp, Artificial Sequence
  Description of Artificial Sequence: Synthetic oligonucleotide
tgcctgccaccttcagggctg

SEQ ID NO: 5511-5519 - skipped (9 entries)

SEQ ID NO: 5520 - DNA, 21 bp, Artificial Sequence
  Description of Artificial Sequence: Synthetic oligonucleotide
aacgagaaggcgatccataag

SEQ ID NO: 5521-5529 - skipped (9 entries)

SEQ ID NO: 5530 - DNA, 21 bp, Artificial Sequence
  Description of Artificial Sequence: Synthetic oligonucleotide
agtgctgtggggctgctaact

SEQ ID NO: 5531-5539 - skipped (9 entries)

SEQ ID NO: 5540 - DNA, 21 bp, Artificial Sequence
  Description of Artificial Sequence: Synthetic oligonucleotide
ttccctcccccagtttaagtg

SEQ ID NO: 5541-5549 - skipped (9 entries)

SEQ ID NO: 5550 - DNA, 21 bp, Artificial Sequence
  Description of Artificial Sequence: Synthetic oligonucleotide
ataacaacttccggcagcaga

SEQ ID NO: 5551-5559 - skipped (9 entries)

SEQ ID NO: 5560 - DNA, 21 bp, Artificial Sequence
  Description of Artificial Sequence: Synthetic oligonucleotide
tgtctcttatcatgttggtgg

SEQ ID NO: 5561-5569 - skipped (9 entries)

SEQ ID NO: 5570 - DNA, 21 bp, Artificial Sequence
  Description of Artificial Sequence: Synthetic oligonucleotide
ccatctttctgtctcttatca

SEQ ID NO: 5571-5579 - skipped (9 entries)

SEQ ID NO: 5580 - DNA, 21 bp, Artificial Sequence
  Description of Artificial Sequence: Synthetic oligonucleotide
ctcctgcagtttgccatcttt

SEQ ID NO: 5581-5589 - skipped (9 entries)

SEQ ID NO: 5590 - DNA, 21 bp, Artificial Sequence
  Description of Artificial Sequence: Synthetic oligonucleotide
tgggctgctgcggggcctgca

SEQ ID NO: 5591-5599 - skipped (9 entries)

SEQ ID NO: 5600 - DNA, 21 bp, Artificial Sequence
  Description of Artificial Sequence: Synthetic oligonucleotide
tgttttcagaacgacaccgta

SEQ ID NO: 5601-5609 - skipped (9 entries)

SEQ ID NO: 5610 - DNA, 21 bp, Artificial Sequence
  Description of Artificial Sequence: Synthetic oligonucleotide
agaacgacaccgtaactatcc

SEQ ID NO: 5611-5619 - skipped (9 entries)

SEQ ID NO: 5620 - DNA, 21 bp, Artificial Sequence
  Description of Artificial Sequence: Synthetic oligonucleotide
ggtcattgatgtccttcaccc

SEQ ID NO: 5621-5629 - skipped (9 entries)

SEQ ID NO: 5630 - DNA, 21 bp, Artificial Sequence
  Description of Artificial Sequence: Synthetic oligonucleotide
tcattcagcatggcctgtatg

SEQ ID NO: 5631-5639 - skipped (9 entries)

SEQ ID NO: 5640 - DNA, 21 bp, Artificial Sequence
  Description of Artificial Sequence: Synthetic oligonucleotide
cctcttcttctggattacaga

SEQ ID NO: 5641-5649 - skipped (9 entries)

SEQ ID NO: 5650 - DNA, 21 bp, Artificial Sequence
  Description of Artificial Sequence: Synthetic oligonucleotide
tagtgcggatagttacggtgt

SEQ ID NO: 5651-5659 - skipped (9 entries)

SEQ ID NO: 5660 - DNA, 21 bp, Artificial Sequence
  Description of Artificial Sequence: Synthetic oligonucleotide
cttaatgaactataccttttt

SEQ ID NO: 5661-5669 - skipped (9 entries)

SEQ ID NO: 5670 - DNA, 21 bp, Artificial Sequence
  Description of Artificial Sequence: Synthetic oligonucleotide
gggctgtgcccaaatgagctt

SEQ ID NO: 5671-5679 - skipped (9 entries)

SEQ ID NO: 5680 - DNA, 21 bp, Artificial Sequence
  Description of Artificial Sequence: Synthetic oligonucleotide
ttccaggaaaatgatgaagtt

SEQ ID NO: 5681-5689 - skipped (9 entries)

SEQ ID NO: 5690 - DNA, 21 bp, Artificial Sequence
  Description of Artificial Sequence: Synthetic oligonucleotide
tacccaatgacggttgcttga

SEQ ID NO: 5691-5699 - skipped (9 entries)

SEQ ID NO: 5700 - DNA, 21 bp, Artificial Sequence
  Description of Artificial Sequence: Synthetic oligonucleotide
agaggagttgaagccaaacag

SEQ ID NO: 5701-5709 - skipped (9 entries)

SEQ ID NO: 5710 - DNA, 21 bp, Artificial Sequence
  Description of Artificial Sequence: Synthetic oligonucleotide
tatttcagaggagttgaagcc

SEQ ID NO: 5711-5719 - skipped (9 entries)

SEQ ID NO: 5720 - DNA, 21 bp, Artificial Sequence
  Description of Artificial Sequence: Synthetic oligonucleotide
ggcaagtgtcgtggacttcgt

SEQ ID NO: 5721-5729 - skipped (9 entries)

SEQ ID NO: 5730 - DNA, 21 bp, Artificial Sequence
  Description of Artificial Sequence: Synthetic oligonucleotide
atttttaggcaagtgtcgtgg

SEQ ID NO: 5731-5739 - skipped (9 entries)

SEQ ID NO: 5740 - DNA, 21 bp, Artificial Sequence
  Description of Artificial Sequence: Synthetic oligonucleotide
tccaggaagttgtccagggca

SEQ ID NO: 5741-5749 - skipped (9 entries)

SEQ ID NO: 5750 - DNA, 21 bp, Artificial Sequence
  Description of Artificial Sequence: Synthetic oligonucleotide
aggcccttgcgcttgcgggtc

SEQ ID NO: 5751-5759 - skipped (9 entries)

SEQ ID NO: 5760 - DNA, 21 bp, Artificial Sequence
  Description of Artificial Sequence: Synthetic oligonucleotide
accactggcagatcctgcccg

SEQ ID NO: 5761-5769 - skipped (9 entries)

SEQ ID NO: 5770 - DNA, 21 bp, Artificial Sequence
  Description of Artificial Sequence: Synthetic oligonucleotide
tggtcaaggcctatctgcccg

SEQ ID NO: 5771-5779 - skipped (9 entries)

SEQ ID NO: 5780 - DNA, 21 bp, Artificial Sequence
  Description of Artificial Sequence: Synthetic oligonucleotide
aacaggaagcggggccacgtg

SEQ ID NO: 5781-5789 - skipped (9 entries)

SEQ ID NO: 5790 - DNA, 21 bp, Artificial Sequence
  Description of Artificial Sequence: Synthetic oligonucleotide
ccttctggcagtgtccagagc

SEQ ID NO: 5791-5799 - skipped (9 entries)

SEQ ID NO: 5800 - DNA, 21 bp, Artificial Sequence
  Description of Artificial Sequence: Synthetic oligonucleotide
tttcccttctggcagtgtcca

SEQ ID NO: 5801-5809 - skipped (9 entries)

SEQ ID NO: 5810 - DNA, 21 bp, Artificial Sequence
  Description of Artificial Sequence: Synthetic oligonucleotide
cttctcccttctgcagggtga

SEQ ID NO: 5811-5819 - skipped (9 entries)

SEQ ID NO: 5820 - DNA, 21 bp, Artificial Sequence
  Description of Artificial Sequence: Synthetic oligonucleotide
gcgtgctgggcctggacctct

SEQ ID NO: 5821-5829 - skipped (9 entries)

SEQ ID NO: 5830 - DNA, 21 bp, Artificial Sequence
  Description of Artificial Sequence: Synthetic oligonucleotide
acaacttcctcatcaccaacg

SEQ ID NO: 5831-5839 - skipped (9 entries)

SEQ ID NO: 5840 - DNA, 21 bp, Artificial Sequence
  Description of Artificial Sequence: Synthetic oligonucleotide
gcaacgagacgtggggcgtaa

SEQ ID NO: 5841-5849 - skipped (9 entries)

SEQ ID NO: 5850 - DNA, 21 bp, Artificial Sequence
  Description of Artificial Sequence: Synthetic oligonucleotide
tgggtggatccaagtgccctt

SEQ ID NO: 5851-5859 - skipped (9 entries)

SEQ ID NO: 5860 - DNA, 21 bp, Artificial Sequence
  Description of Artificial Sequence: Synthetic oligonucleotide
ctccaagtctcacctgccaga

SEQ ID NO: 5861-5869 - skipped (9 entries)

SEQ ID NO: 5870 - DNA, 21 bp, Artificial Sequence
  Description of Artificial Sequence: Synthetic oligonucleotide
ttacgccccacgtctcgttgc

SEQ ID NO: 5871-5879 - skipped (9 entries)

SEQ ID NO: 5880 - DNA, 21 bp, Artificial Sequence
  Description of Artificial Sequence: Synthetic oligonucleotide
tccttcatttgtttctctgct

SEQ ID NO: 5881-5889 - skipped (9 entries)

SEQ ID NO: 5890 - DNA, 21 bp, Artificial Sequence
  Description of Artificial Sequence: Synthetic oligonucleotide
ttgtcttcttcctcctcctta

SEQ ID NO: 5891-5899 - skipped (9 entries)

SEQ ID NO: 5900 - DNA, 21 bp, Artificial Sequence
  Description of Artificial Sequence: Synthetic oligonucleotide
tcctcatcatcctccttgtcc

SEQ ID NO: 5901-5909 - skipped (9 entries)

SEQ ID NO: 5910 - DNA, 21 bp, Artificial Sequence
  Description of Artificial Sequence: Synthetic oligonucleotide
tatgcccagggaaggaggcgc

SEQ ID NO: 5911-5919 - skipped (9 entries)

SEQ ID NO: 5920 - DNA, 21 bp, Artificial Sequence
  Description of Artificial Sequence: Synthetic oligonucleotide
aggcttattcaaacctcctta

SEQ ID NO: 5921-5929 - skipped (9 entries)

SEQ ID NO: 5930 - DNA, 21 bp, Artificial Sequence
  Description of Artificial Sequence: Synthetic oligonucleotide
aggtgagctccaaggaagtga

SEQ ID NO: 5931-5939 - skipped (9 entries)

SEQ ID NO: 5940 - DNA, 21 bp, Artificial Sequence
  Description of Artificial Sequence: Synthetic oligonucleotide
cttctttttcaggtgagctcc

SEQ ID NO: 5941-5949 - skipped (9 entries)

SEQ ID NO: 5950 - DNA, 21 bp, Artificial Sequence
  Description of Artificial Sequence: Synthetic oligonucleotide
cttcagatgacggtcgaacca

SEQ ID NO: 5951-5959 - skipped (9 entries)

SEQ ID NO: 5960 - DNA, 21 bp, Artificial Sequence
  Description of Artificial Sequence: Synthetic oligonucleotide
cagaagtgccggacgtcgggc

SEQ ID NO: 5961-5969 - skipped (9 entries)

SEQ ID NO: 5970 - DNA, 21 bp, Artificial Sequence
  Description of Artificial Sequence: Synthetic oligonucleotide
cagttcctgacggagctgacc

SEQ ID NO: 5971-5979 - skipped (9 entries)

SEQ ID NO: 5980 - DNA, 21 bp, Artificial Sequence
  Description of Artificial Sequence: Synthetic oligonucleotide
tttcggatcttctcgccctca

SEQ ID NO: 5981-5989 - skipped (9 entries)

SEQ ID NO: 5990 - DNA, 21 bp, Artificial Sequence
  Description of Artificial Sequence: Synthetic oligonucleotide
ggatcttctcgccctcagagc

SEQ ID NO: 5991-5999 - skipped (9 entries)

SEQ ID NO: 6000 - DNA, 21 bp, Artificial Sequence
  Description of Artificial Sequence: Synthetic oligonucleotide
tctacattgcctacagtgacg

SEQ ID NO: 6001-6009 - skipped (9 entries)

SEQ ID NO: 6010 - DNA, 21 bp, Artificial Sequence
  Description of Artificial Sequence: Synthetic oligonucleotide
atcccaggaacaccatgaaga

SEQ ID NO: 6011-6019 - skipped (9 entries)

SEQ ID NO: 6020 - DNA, 21 bp, Artificial Sequence
  Description of Artificial Sequence: Synthetic oligonucleotide
tgctttcatcccaggaacacc

SEQ ID NO: 6021-6029 - skipped (9 entries)

SEQ ID NO: 6030 - DNA, 21 bp, Artificial Sequence
  Description of Artificial Sequence: Synthetic oligonucleotide
tcaacaatgtcattccaccca

SEQ ID NO: 6031-6039 - skipped (9 entries)

SEQ ID NO: 6040 - DNA, 21 bp, Artificial Sequence
  Description of Artificial Sequence: Synthetic oligonucleotide
tttgtcaacaatgtcattcca

SEQ ID NO: 6041-6049 - skipped (9 entries)

SEQ ID NO: 6050 - DNA, 21 bp, Artificial Sequence
  Description of Artificial Sequence: Synthetic oligonucleotide
cagttggtcagttctacttct

SEQ ID NO: 6051-6059 - skipped (9 entries)

SEQ ID NO: 6060 - DNA, 21 bp, Artificial Sequence
  Description of Artificial Sequence: Synthetic oligonucleotide
ttgcatcttgtatcttttgca

SEQ ID NO: 6061-6069 - skipped (9 entries)

SEQ ID NO: 6070 - DNA, 21 bp, Artificial Sequence
  Description of Artificial Sequence: Synthetic oligonucleotide
tcaggtgatagtagaaaaggc

SEQ ID NO: 6071-6079 - skipped (9 entries)

SEQ ID NO: 6080 - DNA, 21 bp, Artificial Sequence
  Description of Artificial Sequence: Synthetic oligonucleotide
atctctttatcaggtgatagt

SEQ ID NO: 6081-6089 - skipped (9 entries)

SEQ ID NO: 6090 - DNA, 21 bp, Artificial Sequence
  Description of Artificial Sequence: Synthetic oligonucleotide
ataatctgccactcttggcag

SEQ ID NO: 6091-6099 - skipped (9 entries)

SEQ ID NO: 6100 - DNA, 21 bp, Artificial Sequence
  Description of Artificial Sequence: Synthetic oligonucleotide
taacccagattgaaaaagaag

SEQ ID NO: 6101-6109 - skipped (9 entries)

SEQ ID NO: 6110 - DNA, 21 bp, Artificial Sequence
  Description of Artificial Sequence: Synthetic oligonucleotide
gtattctcttaacagaagact

SEQ ID NO: 6111-6119 - skipped (9 entries)

SEQ ID NO: 6120 - DNA, 21 bp, Artificial Sequence
  Description of Artificial Sequence: Synthetic oligonucleotide
gagaagcttacctcttcagga

SEQ ID NO: 6121-6129 - skipped (9 entries)

SEQ ID NO: 6130 - DNA, 21 bp, Artificial Sequence
  Description of Artificial Sequence: Synthetic oligonucleotide
aattatttattacagtatttt

SEQ ID NO: 6131-6139 - skipped (9 entries)

SEQ ID NO: 6140 - DNA, 21 bp, Artificial Sequence
  Description of Artificial Sequence: Synthetic oligonucleotide
ttacagtattttgatgaaaat

SEQ ID NO: 6141-6149 - skipped (9 entries)

SEQ ID NO: 6150 - DNA, 21 bp, Artificial Sequence
  Description of Artificial Sequence: Synthetic oligonucleotide
ggatttgacgaaacgttcgag

SEQ ID NO: 6151-6159 - skipped (9 entries)

SEQ ID NO: 6160 - DNA, 21 bp, Artificial Sequence
  Description of Artificial Sequence: Synthetic oligonucleotide
acgaaacgttcgagtcaaacg

SEQ ID NO: 6161-6169 - skipped (9 entries)

SEQ ID NO: 6170 - DNA, 21 bp, Artificial Sequence
  Description of Artificial Sequence: Synthetic oligonucleotide
aggttcccgatatggatgatg

SEQ ID NO: 6171-6179 - skipped (9 entries)

SEQ ID NO: 6180 - DNA, 21 bp, Artificial Sequence
  Description of Artificial Sequence: Synthetic oligonucleotide
tttcaggaggatgaaggagaa

SEQ ID NO: 6181-6189 - skipped (9 entries)

SEQ ID NO: 6190 - DNA, 21 bp, Artificial Sequence
  Description of Artificial Sequence: Synthetic oligonucleotide
aggaggatgaaggagaagatg

SEQ ID NO: 6191-6199 - skipped (9 entries)

SEQ ID NO: 6200 - DNA, 21 bp, Artificial Sequence
  Description of Artificial Sequence: Synthetic oligonucleotide
ttttacctctccttcctcccc

SEQ ID NO: 6201-6209 - skipped (9 entries)

SEQ ID NO: 6210 - DNA, 21 bp, Artificial Sequence
  Description of Artificial Sequence: Synthetic oligonucleotide
gccaaattttcttttacctct

SEQ ID NO: 6211-6219 - skipped (9 entries)

SEQ ID NO: 6220 - DNA, 21 bp, Artificial Sequence
  Description of Artificial Sequence: Synthetic oligonucleotide
cagaccacagtccatgccatc

SEQ ID NO: 6221-6229 - skipped (9 entries)

SEQ ID NO: 6230 - DNA, 21 bp, Artificial Sequence
  Description of Artificial Sequence: Synthetic oligonucleotide
atcttctaggtatgacaacga

SEQ ID NO: 6231-6239 - skipped (9 entries)

SEQ ID NO: 6240 - DNA, 21 bp, Artificial Sequence
  Description of Artificial Sequence: Synthetic oligonucleotide
tttgttgtaggaggataagat

SEQ ID NO: 6241-6249 - skipped (9 entries)

SEQ ID NO: 6250 - DNA, 21 bp, Artificial Sequence
  Description of Artificial Sequence: Synthetic oligonucleotide
ttgtaggaggataagatcaat

SEQ ID NO: 6251-6259 - skipped (9 entries)

SEQ ID NO: 6260 - DNA, 21 bp, Artificial Sequence
  Description of Artificial Sequence: Synthetic oligonucleotide
tagctgaggagaagaaagtgg

SEQ ID NO: 6261-6269 - skipped (9 entries)

SEQ ID NO: 6270 - DNA, 21 bp, Artificial Sequence
  Description of Artificial Sequence: Synthetic oligonucleotide
ccaccatcaccttacctttgc

SEQ ID NO: 6271-6279 - skipped (9 entries)

SEQ ID NO: 6280 - DNA, 21 bp, Artificial Sequence
  Description of Artificial Sequence: Synthetic oligonucleotide
ctacctggagcagcagcagtg

SEQ ID NO: 6281-6289 - skipped (9 entries)

SEQ ID NO: 6290 - DNA, 21 bp, Artificial Sequence
  Description of Artificial Sequence: Synthetic oligonucleotide
ctcttaaggggcgcagactcg

SEQ ID NO: 6291-6299 - skipped (9 entries)

SEQ ID NO: 6300 - DNA, 21 bp, Artificial Sequence
  Description of Artificial Sequence: Synthetic oligonucleotide
tagggatcaagcatgaattgc

SEQ ID NO: 6301-6309 - skipped (9 entries)

SEQ ID NO: 6310 - DNA, 21 bp, Artificial Sequence
  Description of Artificial Sequence: Synthetic oligonucleotide
ttctttatagggatcaagcat

SEQ ID NO: 6311-6319 - skipped (9 entries)

SEQ ID NO: 6320 - DNA, 21 bp, Artificial Sequence
  Description of Artificial Sequence: Synthetic oligonucleotide
tgtccagggcccccgagtctg

SEQ ID NO: 6321-6329 - skipped (9 entries)

SEQ ID NO: 6330 - DNA, 21 bp, Artificial Sequence
  Description of Artificial Sequence: Synthetic oligonucleotide
ctcttggtctcccgcagcccg

SEQ ID NO: 6331-6339 - skipped (9 entries)

SEQ ID NO: 6340 - DNA, 21 bp, Artificial Sequence
  Description of Artificial Sequence: Synthetic oligonucleotide
cattatttattttaacccact

SEQ ID NO: 6341-6349 - skipped (9 entries)

SEQ ID NO: 6350 - DNA, 21 bp, Artificial Sequence
  Description of Artificial Sequence: Synthetic oligonucleotide
ttttaacccacttccttgtac

SEQ ID NO: 6351-6359 - skipped (9 entries)

SEQ ID NO: 6360 - DNA, 21 bp, Artificial Sequence
  Description of Artificial Sequence: Synthetic oligonucleotide
acccacttccttgtacttaca

SEQ ID NO: 6361-6369 - skipped (9 entries)

SEQ ID NO: 6370 - DNA, 21 bp, Artificial Sequence
  Description of Artificial Sequence: Synthetic oligonucleotide
cctggtagtttttgaaattag

SEQ ID NO: 6371-6379 - skipped (9 entries)

SEQ ID NO: 6380 - DNA, 21 bp, Artificial Sequence
  Description of Artificial Sequence: Synthetic oligonucleotide
gaaatggaaaaatgtgtaagt

SEQ ID NO: 6381-6389 - skipped (9 entries)

SEQ ID NO: 6390 - DNA, 21 bp, Artificial Sequence
  Description of Artificial Sequence: Synthetic oligonucleotide
cttcccaagttctttattggt

SEQ ID NO: 6391-6399 - skipped (9 entries)

SEQ ID NO: 6400 - DNA, 21 bp, Artificial Sequence
  Description of Artificial Sequence: Synthetic oligonucleotide
tttgcttcccaagttctttat

SEQ ID NO: 6401-6409 - skipped (9 entries)

SEQ ID NO: 6410 - DNA, 21 bp, Artificial Sequence
  Description of Artificial Sequence: Synthetic oligonucleotide
gaatcaaagggaaacttgaag

SEQ ID NO: 6411-6419 - skipped (9 entries)

SEQ ID NO: 6420 - DNA, 21 bp, Artificial Sequence
  Description of Artificial Sequence: Synthetic oligonucleotide
ttaatgcagatggtcagtagg

SEQ ID NO: 6421-6429 - skipped (9 entries)

SEQ ID NO: 6430 - DNA, 21 bp, Artificial Sequence
  Description of Artificial Sequence: Synthetic oligonucleotide
ctacctttcatctcgccttta

SEQ ID NO: 6431-6439 - skipped (9 entries)

SEQ ID NO: 6440 - DNA, 21 bp, Artificial Sequence
  Description of Artificial Sequence: Synthetic oligonucleotide
ttgttcactatgactcctgca

SEQ ID NO: 6441-6449 - skipped (9 entries)

SEQ ID NO: 6450 - DNA, 21 bp, Artificial Sequence
  Description of Artificial Sequence: Synthetic oligonucleotide
ctcacccttttttctgagctc

SEQ ID NO: 6451-6459 - skipped (9 entries)

SEQ ID NO: 6460 - DNA, 21 bp, Artificial Sequence
  Description of Artificial Sequence: Synthetic oligonucleotide
atgcaggttctgccattacag

SEQ ID NO: 6461-6469 - skipped (9 entries)

SEQ ID NO: 6470 - DNA, 21 bp, Artificial Sequence
  Description of Artificial Sequence: Synthetic oligonucleotide
tttttttaatgcaggttctgc

SEQ ID NO: 6471-6479 - skipped (9 entries)

SEQ ID NO: 6480 - DNA, 21 bp, Artificial Sequence
  Description of Artificial Sequence: Synthetic oligonucleotide
ttctctcagtacatccagcag

SEQ ID NO: 6481-6489 - skipped (9 entries)

SEQ ID NO: 6490 - DNA, 21 bp, Artificial Sequence
  Description of Artificial Sequence: Synthetic oligonucleotide
actttctaggtcccgaacccc

SEQ ID NO: 6491-6499 - skipped (9 entries)

SEQ ID NO: 6500 - DNA, 21 bp, Artificial Sequence
  Description of Artificial Sequence: Synthetic oligonucleotide
taggtcccgaacccctggtaa

SEQ ID NO: 6501-6509 - skipped (9 entries)

SEQ ID NO: 6510 - DNA, 21 bp, Artificial Sequence
  Description of Artificial Sequence: Synthetic oligonucleotide
ttatgcaggttcgtgctgtaa

SEQ ID NO: 6511-6519 - skipped (9 entries)

SEQ ID NO: 6520 - DNA, 21 bp, Artificial Sequence
  Description of Artificial Sequence: Synthetic oligonucleotide
gtattttcctttctaggatca

SEQ ID NO: 6521-6529 - skipped (9 entries)

SEQ ID NO: 6530 - DNA, 21 bp, Artificial Sequence
  Description of Artificial Sequence: Synthetic oligonucleotide
ctttctaggatcaagcgtgct

SEQ ID NO: 6531-6539 - skipped (9 entries)

SEQ ID NO: 6540 - DNA, 21 bp, Artificial Sequence
  Description of Artificial Sequence: Synthetic oligonucleotide
taggatcaagcgtgctttcct

SEQ ID NO: 6541-6549 - skipped (9 entries)

SEQ ID NO: 6550 - DNA, 21 bp, Artificial Sequence
  Description of Artificial Sequence: Synthetic oligonucleotide
agaaatacttacagcctagtt

SEQ ID NO: 6551-6559 - skipped (9 entries)

SEQ ID NO: 6560 - DNA, 21 bp, Artificial Sequence
  Description of Artificial Sequence: Synthetic oligonucleotide
acttacctgtcacgaacacat

SEQ ID NO: 6561-6569 - skipped (9 entries)

SEQ ID NO: 6570 - DNA, 21 bp, Artificial Sequence
  Description of Artificial Sequence: Synthetic oligonucleotide
agcatttaacttacctgtcac

SEQ ID NO: 6571-6579 - skipped (9 entries)

SEQ ID NO: 6580 - DNA, 21 bp, Artificial Sequence
  Description of Artificial Sequence: Synthetic oligonucleotide
tctttcagaatgttggctacc

SEQ ID NO: 6581-6589 - skipped (9 entries)

SEQ ID NO: 6590 - DNA, 21 bp, Artificial Sequence
  Description of Artificial Sequence: Synthetic oligonucleotide
agaatgttggctaccagggta

SEQ ID NO: 6591-6599 - skipped (9 entries)

SEQ ID NO: 6600 - DNA, 21 bp, Artificial Sequence
  Description of Artificial Sequence: Synthetic oligonucleotide
cacctctgtgtgtgtacgagc

SEQ ID NO: 6601-6609 - skipped (9 entries)

SEQ ID NO: 6610 - DNA, 21 bp, Artificial Sequence
  Description of Artificial Sequence: Synthetic oligonucleotide
ttcaatatgtttttcagaaag

SEQ ID NO: 6611-6619 - skipped (9 entries)

SEQ ID NO: 6620 - DNA, 21 bp, Artificial Sequence
  Description of Artificial Sequence: Synthetic oligonucleotide
agaaagtgttgtgaagagcga

SEQ ID NO: 6621-6629 - skipped (9 entries)

SEQ ID NO: 6630 - DNA, 21 bp, Artificial Sequence
  Description of Artificial Sequence: Synthetic oligonucleotide
gctcccagcttatatggatcg

SEQ ID NO: 6631-6639 - skipped (9 entries)

SEQ ID NO: 6640 - DNA, 21 bp, Artificial Sequence
  Description of Artificial Sequence: Synthetic oligonucleotide
ctgagatgaacaggggctcga

SEQ ID NO: 6641-6649 - skipped (9 entries)

SEQ ID NO: 6650 - DNA, 21 bp, Artificial Sequence
  Description of Artificial Sequence: Synthetic oligonucleotide
accgcgctcgttatcatgtgg

SEQ ID NO: 6651-6659 - skipped (9 entries)

SEQ ID NO: 6660 - DNA, 21 bp, Artificial Sequence
  Description of Artificial Sequence: Synthetic oligonucleotide
acaaagagtgggtggccaagc

SEQ ID NO: 6661-6669 - skipped (9 entries)

SEQ ID NO: 6670 - DNA, 21 bp, Artificial Sequence
  Description of Artificial Sequence: Synthetic oligonucleotide
tcaaagctttgcgggaggggg

SEQ ID NO: 6671-6679 - skipped (9 entries)

SEQ ID NO: 6680 - DNA, 21 bp, Artificial Sequence
  Description of Artificial Sequence: Synthetic oligonucleotide
gtagtcccacttggaggctaa

SEQ ID NO: 6681-6689 - skipped (9 entries)

SEQ ID NO: 6690 - DNA, 21 bp, Artificial Sequence
  Description of Artificial Sequence: Synthetic oligonucleotide
tccttgctctctgcagaaatg

SEQ ID NO: 6691-6699 - skipped (9 entries)

SEQ ID NO: 6700 - DNA, 21 bp, Artificial Sequence
  Description of Artificial Sequence: Synthetic oligonucleotide
gaacattgatgatggcacctc

SEQ ID NO: 6701-6709 - skipped (9 entries)

SEQ ID NO: 6710 - DNA, 21 bp, Artificial Sequence
  Description of Artificial Sequence: Synthetic oligonucleotide
tccccaggtactctgtggata

SEQ ID NO: 6711-6719 - skipped (9 entries)

SEQ ID NO: 6720 - DNA, 21 bp, Artificial Sequence
  Description of Artificial Sequence: Synthetic oligonucleotide
ccttctagatacaagacaggc

SEQ ID NO: 6721-6729 - skipped (9 entries)

SEQ ID NO: 6730 - DNA, 21 bp, Artificial Sequence
  Description of Artificial Sequence: Synthetic oligonucleotide
cgtccggagtagcgtccagcc

SEQ ID NO: 6731-6739 - skipped (9 entries)

SEQ ID NO: 6740 - DNA, 21 bp, Artificial Sequence
  Description of Artificial Sequence: Synthetic oligonucleotide
tctttgatctcttggcgatct

SEQ ID NO: 6741-6749 - skipped (9 entries)

SEQ ID NO: 6750 - DNA, 21 bp, Artificial Sequence
  Description of Artificial Sequence: Synthetic oligonucleotide
acaaaagattttatctttgat

SEQ ID NO: 6751-6759 - skipped (9 entries)

SEQ ID NO: 6760 - DNA, 21 bp, Artificial Sequence
  Description of Artificial Sequence: Synthetic oligonucleotide
gaggctttgtgttcatttcgc

SEQ ID NO: 6761-6769 - skipped (9 entries)

SEQ ID NO: 6770 - DNA, 21 bp, Artificial Sequence
  Description of Artificial Sequence: Synthetic oligonucleotide
tgttcatttcgccctaggccc

SEQ ID NO: 6771-6779 - skipped (9 entries)

SEQ ID NO: 6780 - DNA, 21 bp, Artificial Sequence
  Description of Artificial Sequence: Synthetic oligonucleotide
gccctaggccccttctcgatg

SEQ ID NO: 6781-6789 - skipped (9 entries)

SEQ ID NO: 6790 - DNA, 21 bp, Artificial Sequence
  Description of Artificial Sequence: Synthetic oligonucleotide
caatgtcctttccccggagct

SEQ ID NO: 6791-6799 - skipped (9 entries)

SEQ ID NO: 6800 - DNA, 21 bp, Artificial Sequence
  Description of Artificial Sequence: Synthetic oligonucleotide
ccaagcacctggttattgggt

SEQ ID NO: 6801-6809 - skipped (9 entries)

SEQ ID NO: 6810 - DNA, 21 bp, Artificial Sequence
  Description of Artificial Sequence: Synthetic oligonucleotide
ttggaagtctccacatcttct

SEQ ID NO: 6811-6819 - skipped (9 entries)

SEQ ID NO: 6820 - DNA, 21 bp, Artificial Sequence
  Description of Artificial Sequence: Synthetic oligonucleotide
gcctgggcggccgtagggccc

SEQ ID NO: 6821-6829 - skipped (9 entries)

SEQ ID NO: 6830 - DNA, 21 bp, Artificial Sequence
  Description of Artificial Sequence: Synthetic oligonucleotide
aggcctcaagctccggggaaa

SEQ ID NO: 6831-6839 - skipped (9 entries)

SEQ ID NO: 6840 - DNA, 21 bp, Artificial Sequence
  Description of Artificial Sequence: Synthetic oligonucleotide
gaaaatcaatgagaagccaca

SEQ ID NO: 6841-6849 - skipped (9 entries)

SEQ ID NO: 6850 - DNA, 21 bp, Artificial Sequence
  Description of Artificial Sequence: Synthetic oligonucleotide
cctcacaccgactccaggggc

SEQ ID NO: 6851-6859 - skipped (9 entries)

SEQ ID NO: 6860 - DNA, 21 bp, Artificial Sequence
  Description of Artificial Sequence: Synthetic oligonucleotide
taggctatcttagcggcacag

SEQ ID NO: 6861-6869 - skipped (9 entries)

SEQ ID NO: 6870 - DNA, 21 bp, Artificial Sequence
  Description of Artificial Sequence: Synthetic oligonucleotide
taattttctaggctatcttag

SEQ ID NO: 6871-6879 - skipped (9 entries)

SEQ ID NO: 6880 - DNA, 21 bp, Artificial Sequence
  Description of Artificial Sequence: Synthetic oligonucleotide
aaagaaaaatgcttaaatttc

SEQ ID NO: 6881-6889 - skipped (9 entries)

SEQ ID NO: 6890 - DNA, 21 bp, Artificial Sequence
  Description of Artificial Sequence: Synthetic oligonucleotide
agaatgagcaagattcacttt

SEQ ID NO: 6891-6899 - skipped (9 entries)

SEQ ID NO: 6900 - DNA, 21 bp, Artificial Sequence
  Description of Artificial Sequence: Synthetic oligonucleotide
taggtagaggccctgcttctt

SEQ ID NO: 6901-6909 - skipped (9 entries)

SEQ ID NO: 6910 - DNA, 21 bp, Artificial Sequence
  Description of Artificial Sequence: Synthetic oligonucleotide
gatctaacaaccacaagagaa

SEQ ID NO: 6911-6919 - skipped (9 entries)

SEQ ID NO: 6920 - DNA, 21 bp, Artificial Sequence
  Description of Artificial Sequence: Synthetic oligonucleotide
gcttttgttcattcataaact

SEQ ID NO: 6921-6929 - skipped (9 entries)

SEQ ID NO: 6930 - DNA, 21 bp, Artificial Sequence
  Description of Artificial Sequence: Synthetic oligonucleotide
ttcattcataaactccaagtc

SEQ ID NO: 6931-6939 - skipped (9 entries)

SEQ ID NO: 6940 - DNA, 21 bp, Artificial Sequence
  Description of Artificial Sequence: Synthetic oligonucleotide
cctcagagggaacatactgct

SEQ ID NO: 6941-6949 - skipped (9 entries)

SEQ ID NO: 6950 - DNA, 21 bp, Artificial Sequence
  Description of Artificial Sequence: Synthetic oligonucleotide
tccatcttcaagaaaattcct

SEQ ID NO: 6951-6959 - skipped (9 entries)

SEQ ID NO: 6960 - DNA, 21 bp, Artificial Sequence
  Description of Artificial Sequence: Synthetic oligonucleotide
cttagagatgattctctcaaa

SEQ ID NO: 6961-6969 - skipped (9 entries)

SEQ ID NO: 6970 - DNA, 21 bp, Artificial Sequence
  Description of Artificial Sequence: Synthetic oligonucleotide
taggctcctgctccaaatgtg

SEQ ID NO: 6971-6979 - skipped (9 entries)

SEQ ID NO: 6980 - DNA, 21 bp, Artificial Sequence
  Description of Artificial Sequence: Synthetic oligonucleotide
cgtcatcggcttgaagataaa

SEQ ID NO: 6981-6989 - skipped (9 entries)

SEQ ID NO: 6990 - DNA, 21 bp, Artificial Sequence
  Description of Artificial Sequence: Synthetic oligonucleotide
tgaatgaacaaaagctaaaca

SEQ ID NO: 6991-6999 - skipped (9 entries)

SEQ ID NO: 7000 - DNA, 21 bp, Artificial Sequence
  Description of Artificial Sequence: Synthetic oligonucleotide
cagaagctgagtatctatggt

SEQ ID NO: 7001-7009 - skipped (9 entries)

SEQ ID NO: 7010 - DNA, 21 bp, Artificial Sequence
  Description of Artificial Sequence: Synthetic oligonucleotide
ttttgcagaagctgagtatct

SEQ ID NO: 7011-7019 - skipped (9 entries)

SEQ ID NO: 7020 - DNA, 21 bp, Artificial Sequence
  Description of Artificial Sequence: Synthetic oligonucleotide
ttgtgcaactgttgctacagc

SEQ ID NO: 7021-7029 - skipped (9 entries)

SEQ ID NO: 7030 - DNA, 21 bp, Artificial Sequence
  Description of Artificial Sequence: Synthetic oligonucleotide
gatttgttgtgcaactgttgc

SEQ ID NO: 7031-7039 - skipped (9 entries)

SEQ ID NO: 7040 - DNA, 21 bp, Artificial Sequence
  Description of Artificial Sequence: Synthetic oligonucleotide
actacaactcttgtcctctcg

SEQ ID NO: 7041-7049 - skipped (9 entries)

SEQ ID NO: 7050 - DNA, 21 bp, Artificial Sequence
  Description of Artificial Sequence: Synthetic oligonucleotide
cagtaactctgggtggatttt

SEQ ID NO: 7051-7059 - skipped (9 entries)

SEQ ID NO: 7060 - DNA, 21 bp, Artificial Sequence
  Description of Artificial Sequence: Synthetic oligonucleotide
ttgaagatggagaaagtgatg

SEQ ID NO: 7061-7069 - skipped (9 entries)

SEQ ID NO: 7070 - DNA, 21 bp, Artificial Sequence
  Description of Artificial Sequence: Synthetic oligonucleotide
agcagatctgcaaatgagaaa

SEQ ID NO: 7071-7079 - skipped (9 entries)

SEQ ID NO: 7080 - DNA, 21 bp, Artificial Sequence
  Description of Artificial Sequence: Synthetic oligonucleotide
agagaatcatctctaagcaaa

SEQ ID NO: 7081-7089 - skipped (9 entries)

SEQ ID NO: 7090 - DNA, 21 bp, Artificial Sequence
  Description of Artificial Sequence: Synthetic oligonucleotide
gagcaggagcctacaaatttg

SEQ ID NO: 7091-7099 - skipped (9 entries)

SEQ ID NO: 7100 - DNA, 21 bp, Artificial Sequence
  Description of Artificial Sequence: Synthetic oligonucleotide
gtctaagccagaaatccagta

SEQ ID NO: 7101-7109 - skipped (9 entries)

SEQ ID NO: 7110 - DNA, 21 bp, Artificial Sequence
  Description of Artificial Sequence: Synthetic oligonucleotide
attattattttagtctaagcc

SEQ ID NO: 7111-7119 - skipped (9 entries)

SEQ ID NO: 7120 - DNA, 21 bp, Artificial Sequence
  Description of Artificial Sequence: Synthetic oligonucleotide
tcttcaagccgatgacggaaa

SEQ ID NO: 7121-7129 - skipped (9 entries)

SEQ ID NO: 7130 - DNA, 21 bp, Artificial Sequence
  Description of Artificial Sequence: Synthetic oligonucleotide
tcttttccaggaatttgacaa

SEQ ID NO: 7131-7139 - skipped (9 entries)

SEQ ID NO: 7140 - DNA, 21 bp, Artificial Sequence
  Description of Artificial Sequence: Synthetic oligonucleotide
caggaatttgacaagaagtac

SEQ ID NO: 7141-7149 - skipped (9 entries)

SEQ ID NO: 7150 - DNA, 21 bp, Artificial Sequence
  Description of Artificial Sequence: Synthetic oligonucleotide
atgtgtcacataactaccgaa

SEQ ID NO: 7151-7159 - skipped (9 entries)

SEQ ID NO: 7160 - DNA, 21 bp, Artificial Sequence
  Description of Artificial Sequence: Synthetic oligonucleotide
tttcttaggaacatcattcat

SEQ ID NO: 7161-7169 - skipped (9 entries)

SEQ ID NO: 7170 - DNA, 21 bp, Artificial Sequence
  Description of Artificial Sequence: Synthetic oligonucleotide
ttaggaacatcattcatggca

SEQ ID NO: 7171-7179 - skipped (9 entries)

SEQ ID NO: 7180 - DNA, 21 bp, Artificial Sequence
  Description of Artificial Sequence: Synthetic oligonucleotide
gctgatggcaacacctcatag

SEQ ID NO: 7181-7189 - skipped (9 entries)

SEQ ID NO: 7190 - DNA, 21 bp, Artificial Sequence
  Description of Artificial Sequence: Synthetic oligonucleotide
tgttttctaggagttggcctg

SEQ ID NO: 7191-7199 - skipped (9 entries)

SEQ ID NO: 7200 - DNA, 21 bp, Artificial Sequence
  Description of Artificial Sequence: Synthetic oligonucleotide
taggagttggcctgggccctg

SEQ ID NO: 7201-7209 - skipped (9 entries)

SEQ ID NO: 7210 - DNA, 21 bp, Artificial Sequence
  Description of Artificial Sequence: Synthetic oligonucleotide
tattgctgtcaaccccaggta

SEQ ID NO: 7211-7219 - skipped (9 entries)

SEQ ID NO: 7220 - DNA, 21 bp, Artificial Sequence
  Description of Artificial Sequence: Synthetic oligonucleotide
taacagcatccttcccactgc

SEQ ID NO: 7221-7229 - skipped (9 entries)

SEQ ID NO: 7230 - DNA, 21 bp, Artificial Sequence
  Description of Artificial Sequence: Synthetic oligonucleotide
atgggcacggcaatgatcttt

SEQ ID NO: 7231-7239 - skipped (9 entries)

SEQ ID NO: 7240 - DNA, 21 bp, Artificial Sequence
  Description of Artificial Sequence: Synthetic oligonucleotide
cctgcttcaccctcagtgcac

SEQ ID NO: 7241-7249 - skipped (9 entries)

SEQ ID NO: 7250 - DNA, 21 bp, Artificial Sequence
  Description of Artificial Sequence: Synthetic oligonucleotide
ctgtgtcttataggtatcttg

SEQ ID NO: 7251-7259 - skipped (9 entries)

SEQ ID NO: 7260 - DNA, 21 bp, Artificial Sequence
  Description of Artificial Sequence: Synthetic oligonucleotide
tcttccctggggaatgttttc

SEQ ID NO: 7261-7269 - skipped (9 entries)

SEQ ID NO: 7270 - DNA, 21 bp, Artificial Sequence
  Description of Artificial Sequence: Synthetic oligonucleotide
gatccatttggcttttccagg

SEQ ID NO: 7271-7279 - skipped (9 entries)

SEQ ID NO: 7280 - DNA, 21 bp, Artificial Sequence
  Description of Artificial Sequence: Synthetic oligonucleotide
ttaggcaaacctgtatgtggg

SEQ ID NO: 7281-7289 - skipped (9 entries)

SEQ ID NO: 7290 - DNA, 21 bp, Artificial Sequence
  Description of Artificial Sequence: Synthetic oligonucleotide
atactcaactcattattgaaa

SEQ ID NO: 7291-7299 - skipped (9 entries)

SEQ ID NO: 7300 - DNA, 21 bp, Artificial Sequence
  Description of Artificial Sequence: Synthetic oligonucleotide
aggcactgcattgatctcttc

SEQ ID NO: 7301-7309 - skipped (9 entries)

SEQ ID NO: 7310 - DNA, 21 bp, Artificial Sequence
  Description of Artificial Sequence: Synthetic oligonucleotide
attactgtcttcagaaaactc

SEQ ID NO: 7311-7319 - skipped (9 entries)

SEQ ID NO: 7320 - DNA, 21 bp, Artificial Sequence
  Description of Artificial Sequence: Synthetic oligonucleotide
tccatttctaggataagaaga

SEQ ID NO: 7321-7329 - skipped (9 entries)

SEQ ID NO: 7330 - DNA, 21 bp, Artificial Sequence
  Description of Artificial Sequence: Synthetic oligonucleotide
taggataagaagaaagagaag

SEQ ID NO: 7331-7339 - skipped (9 entries)

SEQ ID NO: 7340 - DNA, 21 bp, Artificial Sequence
  Description of Artificial Sequence: Synthetic oligonucleotide
atggctatgaggtgttgccat

SEQ ID NO: 7341-7349 - skipped (9 entries)

SEQ ID NO: 7350 - DNA, 21 bp, Artificial Sequence
  Description of Artificial Sequence: Synthetic oligonucleotide
tgttcagtttcatggctatga

SEQ ID NO: 7351-7359 - skipped (9 entries)

SEQ ID NO: 7360 - DNA, 21 bp, Artificial Sequence
  Description of Artificial Sequence: Synthetic oligonucleotide
ccagttcacacttacctccca

SEQ ID NO: 7361-7369 - skipped (9 entries)

SEQ ID NO: 7370 - DNA, 21 bp, Artificial Sequence
  Description of Artificial Sequence: Synthetic oligonucleotide
aataatgagttgagtatcaaa

SEQ ID NO: 7371-7379 - skipped (9 entries)

SEQ ID NO: 7380 - DNA, 21 bp, Artificial Sequence
  Description of Artificial Sequence: Synthetic oligonucleotide
tgaagacagtaatgaaatcta

SEQ ID NO: 7381-7389 - skipped (9 entries)

SEQ ID NO: 7390 - DNA, 21 bp, Artificial Sequence
  Description of Artificial Sequence: Synthetic oligonucleotide
attcatggccaggatcatcat

SEQ ID NO: 7391-7399 - skipped (9 entries)

SEQ ID NO: 7400 - DNA, 21 bp, Artificial Sequence
  Description of Artificial Sequence: Synthetic oligonucleotide
ggttgtaggctaactaacctt

SEQ ID NO: 7401-7409 - skipped (9 entries)

SEQ ID NO: 7410 - DNA, 21 bp, Artificial Sequence
  Description of Artificial Sequence: Synthetic oligonucleotide
tttaggaaattgaagttggtg

SEQ ID NO: 7411-7419 - skipped (9 entries)

SEQ ID NO: 7420 - DNA, 21 bp, Artificial Sequence
  Description of Artificial Sequence: Synthetic oligonucleotide
ggaaattgaagttggtggtgg

SEQ ID NO: 7421-7429 - skipped (9 entries)

SEQ ID NO: 7430 - DNA, 21 bp, Artificial Sequence
  Description of Artificial Sequence: Synthetic oligonucleotide
ccttacagaggagaattctgc

SEQ ID NO: 7431-7439 - skipped (9 entries)

SEQ ID NO: 7440 - DNA, 21 bp, Artificial Sequence
  Description of Artificial Sequence: Synthetic oligonucleotide
aactattcttttagccgtact

SEQ ID NO: 7441-7449 - skipped (9 entries)

SEQ ID NO: 7450 - DNA, 21 bp, Artificial Sequence
  Description of Artificial Sequence: Synthetic oligonucleotide
gccgtactctgacagctgtgc

SEQ ID NO: 7451-7459 - skipped (9 entries)

SEQ ID NO: 7460 - DNA, 21 bp, Artificial Sequence
  Description of Artificial Sequence: Synthetic oligonucleotide
ttttcttgtaggttgaaactt

SEQ ID NO: 7461-7469 - skipped (9 entries)

SEQ ID NO: 7470 - DNA, 21 bp, Artificial Sequence
  Description of Artificial Sequence: Synthetic oligonucleotide
ttgtaggttgaaactttttct

SEQ ID NO: 7471-7479 - skipped (9 entries)

SEQ ID NO: 7480 - DNA, 21 bp, Artificial Sequence
  Description of Artificial Sequence: Synthetic oligonucleotide
tgaaactactaaaatactcac

SEQ ID NO: 7481-7489 - skipped (9 entries)

SEQ ID NO: 7490 - DNA, 21 bp, Artificial Sequence
  Description of Artificial Sequence: Synthetic oligonucleotide
cttcccagggcgtgatggtgg

SEQ ID NO: 7491-7499 - skipped (9 entries)

SEQ ID NO: 7500 - DNA, 21 bp, Artificial Sequence
  Description of Artificial Sequence: Synthetic oligonucleotide
atttgtagtgatgatgatgat

SEQ ID NO: 7501-7509 - skipped (9 entries)

SEQ ID NO: 7510 - DNA, 21 bp, Artificial Sequence
  Description of Artificial Sequence: Synthetic oligonucleotide
taattgcagtctatacgagat

SEQ ID NO: 7511-7519 - skipped (9 entries)

SEQ ID NO: 7520 - DNA, 21 bp, Artificial Sequence
  Description of Artificial Sequence: Synthetic oligonucleotide
gaaattcatttctttttcagg

SEQ ID NO: 7521-7529 - skipped (9 entries)

SEQ ID NO: 7530 - DNA, 21 bp, Artificial Sequence
  Description of Artificial Sequence: Synthetic oligonucleotide
tttttcagggacaagaatcct

SEQ ID NO: 7531-7539 - skipped (9 entries)

SEQ ID NO: 7540 - DNA, 21 bp, Artificial Sequence
  Description of Artificial Sequence: Synthetic oligonucleotide
agggacaagaatccttcaaga

SEQ ID NO: 7541-7549 - skipped (9 entries)

SEQ ID NO: 7550 - DNA, 21 bp, Artificial Sequence
  Description of Artificial Sequence: Synthetic oligonucleotide
tcttaatagggtggttctctt

SEQ ID NO: 7551-7559 - skipped (9 entries)

SEQ ID NO: 7560 - DNA, 21 bp, Artificial Sequence
  Description of Artificial Sequence: Synthetic oligonucleotide
caggctattcaagatctctgg

SEQ ID NO: 7561-7569 - skipped (9 entries)

SEQ ID NO: 7570 - DNA, 21 bp, Artificial Sequence
  Description of Artificial Sequence: Synthetic oligonucleotide
taaaatcatacttactcttca

SEQ ID NO: 7571-7579 - skipped (9 entries)

SEQ ID NO: 7580 - DNA, 21 bp, Artificial Sequence
  Description of Artificial Sequence: Synthetic oligonucleotide
ctcactttttctatacttgct

SEQ ID NO: 7581-7589 - skipped (9 entries)

SEQ ID NO: 7590 - DNA, 21 bp, Artificial Sequence
  Description of Artificial Sequence: Synthetic oligonucleotide
tttttcttggtacgctgcttc

SEQ ID NO: 7591-7599 - skipped (9 entries)

SEQ ID NO: 7600 - DNA, 21 bp, Artificial Sequence
  Description of Artificial Sequence: Synthetic oligonucleotide
gggcccaggcggcgaggcact

SEQ ID NO: 7601-7609 - skipped (9 entries)

SEQ ID NO: 7610 - DNA, 21 bp, Artificial Sequence
  Description of Artificial Sequence: Synthetic oligonucleotide
ggaggctaaggagaagcgcca

SEQ ID NO: 7611-7619 - skipped (9 entries)

SEQ ID NO: 7620 - DNA, 21 bp, Artificial Sequence
  Description of Artificial Sequence: Synthetic oligonucleotide
tttaggaggctaaggagaagc

SEQ ID NO: 7621-7629 - skipped (9 entries)

SEQ ID NO: 7630 - DNA, 21 bp, Artificial Sequence
  Description of Artificial Sequence: Synthetic oligonucleotide
ttttgtttaggaggctaagga

SEQ ID NO: 7631-7639 - skipped (9 entries)

SEQ ID NO: 7640 - DNA, 21 bp, Artificial Sequence
  Description of Artificial Sequence: Synthetic oligonucleotide
ggtaagaaacctaggaccaaa

SEQ ID NO: 7641-7649 - skipped (9 entries)

SEQ ID NO: 7650 - DNA, 21 bp, Artificial Sequence
  Description of Artificial Sequence: Synthetic oligonucleotide
aatttttaggtaagaaaccta

SEQ ID NO: 7651-7659 - skipped (9 entries)

SEQ ID NO: 7660 - DNA, 21 bp, Artificial Sequence
  Description of Artificial Sequence: Synthetic oligonucleotide
ttctaaggagagaaggatatt

SEQ ID NO: 7661-7669 - skipped (9 entries)

SEQ ID NO: 7670 - DNA, 21 bp, Artificial Sequence
  Description of Artificial Sequence: Synthetic oligonucleotide
cttaaaggaaccattaaagag

SEQ ID NO: 7671-7679 - skipped (9 entries)

SEQ ID NO: 7680 - DNA, 21 bp, Artificial Sequence
  Description of Artificial Sequence: Synthetic oligonucleotide
tttacttaaaggaaccattaa

SEQ ID NO: 7681-7689 - skipped (9 entries)

SEQ ID NO: 7690 - DNA, 21 bp, Artificial Sequence
  Description of Artificial Sequence: Synthetic oligonucleotide
ctcttctgcagttaaacacag

SEQ ID NO: 7691-7699 - skipped (9 entries)

SEQ ID NO: 7700 - DNA, 21 bp, Artificial Sequence
  Description of Artificial Sequence: Synthetic oligonucleotide
ctgtttcctcttctgcagtta

SEQ ID NO: 7701-7709 - skipped (9 entries)

SEQ ID NO: 7710 - DNA, 21 bp, Artificial Sequence
  Description of Artificial Sequence: Synthetic oligonucleotide
tagtctccaaaaaaagttggt

SEQ ID NO: 7711-7719 - skipped (9 entries)

SEQ ID NO: 7720 - DNA, 21 bp, Artificial Sequence
  Description of Artificial Sequence: Synthetic oligonucleotide
tttctagtctccaaaaaaagt

SEQ ID NO: 7721-7729 - skipped (9 entries)

SEQ ID NO: 7730 - DNA, 21 bp, Artificial Sequence
  Description of Artificial Sequence: Synthetic oligonucleotide
ccccagtatacctgaggtgca

SEQ ID NO: 7731-7739 - skipped (9 entries)

SEQ ID NO: 7740 - DNA, 21 bp, Artificial Sequence
  Description of Artificial Sequence: Synthetic oligonucleotide
aacctgttacccacagaccct

SEQ ID NO: 7741-7749 - skipped (9 entries)

SEQ ID NO: 7750 - DNA, 21 bp, Artificial Sequence
  Description of Artificial Sequence: Synthetic oligonucleotide
gcattgacacatgtcgcagca

SEQ ID NO: 7751-7759 - skipped (9 entries)

SEQ ID NO: 7760 - DNA, 21 bp, Artificial Sequence
  Description of Artificial Sequence: Synthetic oligonucleotide
aggaattcaagtacttgtgga

SEQ ID NO: 7761-7769 - skipped (9 entries)

SEQ ID NO: 7770 - DNA, 21 bp, Artificial Sequence
  Description of Artificial Sequence: Synthetic oligonucleotide
cagtagtgaactcccaggtgc

SEQ ID NO: 7771-7779 - skipped (9 entries)

SEQ ID NO: 7780 - DNA, 21 bp, Artificial Sequence
  Description of Artificial Sequence: Synthetic oligonucleotide
atgttgttccacaagtacttg

SEQ ID NO: 7781-7789 - skipped (9 entries)

SEQ ID NO: 7790 - DNA, 21 bp, Artificial Sequence
  Description of Artificial Sequence: Synthetic oligonucleotide
tacacacctgccaccttttga

SEQ ID NO: 7791-7799 - skipped (9 entries)

SEQ ID NO: 7800 - DNA, 21 bp, Artificial Sequence
  Description of Artificial Sequence: Synthetic oligonucleotide
agaggtttctacacacctgcc

SEQ ID NO: 7801-7809 - skipped (9 entries)

SEQ ID NO: 7810 - DNA, 21 bp, Artificial Sequence
  Description of Artificial Sequence: Synthetic oligonucleotide
atctgagtagcgtcggatgat

SEQ ID NO: 7811-7819 - skipped (9 entries)

SEQ ID NO: 7820 - DNA, 21 bp, Artificial Sequence
  Description of Artificial Sequence: Synthetic oligonucleotide
tcaagagatttgaaggcacct

SEQ ID NO: 7821-7829 - skipped (9 entries)

SEQ ID NO: 7830 - DNA, 21 bp, Artificial Sequence
  Description of Artificial Sequence: Synthetic oligonucleotide
tccagtgccatctttgtcaag

SEQ ID NO: 7831-7839 - skipped (9 entries)

SEQ ID NO: 7840 - DNA, 21 bp, Artificial Sequence
  Description of Artificial Sequence: Synthetic oligonucleotide
cagggtggctttgtccactat

SEQ ID NO: 7841-7849 - skipped (9 entries)

SEQ ID NO: 7850 - DNA, 21 bp, Artificial Sequence
  Description of Artificial Sequence: Synthetic oligonucleotide
tttattagcttacctttctgt

SEQ ID NO: 7851-7859 - skipped (9 entries)

SEQ ID NO: 7860 - DNA, 21 bp, Artificial Sequence
  Description of Artificial Sequence: Synthetic oligonucleotide
ttagcttacctttctgttcct

SEQ ID NO: 7861-7869 - skipped (9 entries)

SEQ ID NO: 7870 - DNA, 21 bp, Artificial Sequence
  Description of Artificial Sequence: Synthetic oligonucleotide
agtgaatcatctacagcctct

SEQ ID NO: 7871-7879 - skipped (9 entries)

SEQ ID NO: 7880 - DNA, 21 bp, Artificial Sequence
  Description of Artificial Sequence: Synthetic oligonucleotide
tttttcagtgaatcatctaca

SEQ ID NO: 7881-7889 - skipped (9 entries)

SEQ ID NO: 7890 - DNA, 21 bp, Artificial Sequence
  Description of Artificial Sequence: Synthetic oligonucleotide
cccttttttctttttcagtga

SEQ ID NO: 7891-7899 - skipped (9 entries)

SEQ ID NO: 7900 - DNA, 21 bp, Artificial Sequence
  Description of Artificial Sequence: Synthetic oligonucleotide
aggtgtaatcctgagagattc

SEQ ID NO: 7901-7909 - skipped (9 entries)

SEQ ID NO: 7910 - DNA, 21 bp, Artificial Sequence
  Description of Artificial Sequence: Synthetic oligonucleotide
tattccataacagtggttgaa

SEQ ID NO: 7911-7919 - skipped (9 entries)

SEQ ID NO: 7920 - DNA, 21 bp, Artificial Sequence
  Description of Artificial Sequence: Synthetic oligonucleotide
tccacagctccgctagcaatc

SEQ ID NO: 7921-7929 - skipped (9 entries)

SEQ ID NO: 7930 - DNA, 21 bp, Artificial Sequence
  Description of Artificial Sequence: Synthetic oligonucleotide
tgacccttcttctctttctag

SEQ ID NO: 7931-7939 - skipped (9 entries)

SEQ ID NO: 7940 - DNA, 21 bp, Artificial Sequence
  Description of Artificial Sequence: Synthetic oligonucleotide
taggttgacaaggtcacaggc

SEQ ID NO: 7941-7949 - skipped (9 entries)

SEQ ID NO: 7950 - DNA, 21 bp, Artificial Sequence
  Description of Artificial Sequence: Synthetic oligonucleotide
ttaagggtgagtcagatgatt

SEQ ID NO: 7951-7959 - skipped (9 entries)

SEQ ID NO: 7960 - DNA, 21 bp, Artificial Sequence
  Description of Artificial Sequence: Synthetic oligonucleotide
ccctggttctaggaacttttg

SEQ ID NO: 7961-7969 - skipped (9 entries)

SEQ ID NO: 7970 - DNA, 21 bp, Artificial Sequence
  Description of Artificial Sequence: Synthetic oligonucleotide
agacgatgccatcggccttgg

SEQ ID NO: 7971-7979 - skipped (9 entries)

SEQ ID NO: 7980 - DNA, 21 bp, Artificial Sequence
  Description of Artificial Sequence: Synthetic oligonucleotide
attttctttccttaggcggta

SEQ ID NO: 7981-7989 - skipped (9 entries)

SEQ ID NO: 7990 - DNA, 21 bp, Artificial Sequence
  Description of Artificial Sequence: Synthetic oligonucleotide
tttccttaggcggtaaccagc

SEQ ID NO: 7991-7999 - skipped (9 entries)

SEQ ID NO: 8000 - DNA, 21 bp, Artificial Sequence
  Description of Artificial Sequence: Synthetic oligonucleotide
cttaggcggtaaccagcgtga

SEQ ID NO: 8001-8009 - skipped (9 entries)

SEQ ID NO: 8010 - DNA, 21 bp, Artificial Sequence
  Description of Artificial Sequence: Synthetic oligonucleotide
tgctgccgcccgcaagcagag

SEQ ID NO: 8011-8019 - skipped (9 entries)

SEQ ID NO: 8020 - DNA, 21 bp, Artificial Sequence
  Description of Artificial Sequence: Synthetic oligonucleotide
atattcttctggcgggcgagc

SEQ ID NO: 8021-8029 - skipped (9 entries)

SEQ ID NO: 8030 - DNA, 21 bp, Artificial Sequence
  Description of Artificial Sequence: Synthetic oligonucleotide
ccttaaccgagtcgctctgct

SEQ ID NO: 8031-8039 - skipped (9 entries)

SEQ ID NO: 8040 - DNA, 21 bp, Artificial Sequence
  Description of Artificial Sequence: Synthetic oligonucleotide
cctcccctccctggggctacc

SEQ ID NO: 8041-8049 - skipped (9 entries)

SEQ ID NO: 8050 - DNA, 21 bp, Artificial Sequence
  Description of Artificial Sequence: Synthetic oligonucleotide
tttcccctcctgccttttagg

SEQ ID NO: 8051-8059 - skipped (9 entries)

SEQ ID NO: 8060 - DNA, 21 bp, Artificial Sequence
  Description of Artificial Sequence: Synthetic oligonucleotide
ccctcctgccttttagggaag

SEQ ID NO: 8061-8069 - skipped (9 entries)

SEQ ID NO: 8070 - DNA, 21 bp, Artificial Sequence
  Description of Artificial Sequence: Synthetic oligonucleotide
gggaagacaaaggcgctttgg

SEQ ID NO: 8071-8079 - skipped (9 entries)

SEQ ID NO: 8080 - DNA, 21 bp, Artificial Sequence
  Description of Artificial Sequence: Synthetic oligonucleotide
tcttttcagatccgccgtcac

SEQ ID NO: 8081-8089 - skipped (9 entries)

SEQ ID NO: 8090 - DNA, 21 bp, Artificial Sequence
  Description of Artificial Sequence: Synthetic oligonucleotide
agatccgccgtcactggggtg

SEQ ID NO: 8091-8099 - skipped (9 entries)

SEQ ID NO: 8100 - DNA, 21 bp, Artificial Sequence
  Description of Artificial Sequence: Synthetic oligonucleotide
gggccaggctgtgtacttacg

SEQ ID NO: 8101-8109 - skipped (9 entries)

SEQ ID NO: 8110 - DNA, 21 bp, Artificial Sequence
  Description of Artificial Sequence: Synthetic oligonucleotide
gtgtaaagctgcctcttacct

SEQ ID NO: 8111-8119 - skipped (9 entries)

SEQ ID NO: 8120 - DNA, 21 bp, Artificial Sequence
  Description of Artificial Sequence: Synthetic oligonucleotide
taaattacctccaccatatgg

SEQ ID NO: 8121-8129 - skipped (9 entries)

SEQ ID NO: 8130 - DNA, 21 bp, Artificial Sequence
  Description of Artificial Sequence: Synthetic oligonucleotide
cactcttcattggaccgtagt

SEQ ID NO: 8131-8139 - skipped (9 entries)

SEQ ID NO: 8140 - DNA, 21 bp, Artificial Sequence
  Description of Artificial Sequence: Synthetic oligonucleotide
caaaatcattgtaatttccac

SEQ ID NO: 8141-8149 - skipped (9 entries)

SEQ ID NO: 8150 - DNA, 21 bp, Artificial Sequence
  Description of Artificial Sequence: Synthetic oligonucleotide
ttacctcctccatagttgtca

SEQ ID NO: 8151-8159 - skipped (9 entries)

SEQ ID NO: 8160 - DNA, 21 bp, Artificial Sequence
  Description of Artificial Sequence: Synthetic oligonucleotide
caccgccaccacgtgaatccc

SEQ ID NO: 8161-8169 - skipped (9 entries)

SEQ ID NO: 8170 - DNA, 21 bp, Artificial Sequence
  Description of Artificial Sequence: Synthetic oligonucleotide
gtggtagcaggaacatggggg

SEQ ID NO: 8171-8179 - skipped (9 entries)

SEQ ID NO: 8180 - DNA, 21 bp, Artificial Sequence
  Description of Artificial Sequence: Synthetic oligonucleotide
gaaattataaccagcaacctt

SEQ ID NO: 8181-8189 - skipped (9 entries)

SEQ ID NO: 8190 - DNA, 21 bp, Artificial Sequence
  Description of Artificial Sequence: Synthetic oligonucleotide
ataggaaattatggaagtgga

SEQ ID NO: 8191-8199 - skipped (9 entries)

SEQ ID NO: 8200 - DNA, 21 bp, Artificial Sequence
  Description of Artificial Sequence: Synthetic oligonucleotide
gaggtagccccggttatggag

SEQ ID NO: 8201-8209 - skipped (9 entries)

SEQ ID NO: 8210 - DNA, 21 bp, Artificial Sequence
  Description of Artificial Sequence: Synthetic oligonucleotide
taataggtggcaattttggag

SEQ ID NO: 8211-8219 - skipped (9 entries)

SEQ ID NO: 8220 - DNA, 21 bp, Artificial Sequence
  Description of Artificial Sequence: Synthetic oligonucleotide
gggatggctataatgggtatg

SEQ ID NO: 8221-8229 - skipped (9 entries)

SEQ ID NO: 8230 - DNA, 21 bp, Artificial Sequence
  Description of Artificial Sequence: Synthetic oligonucleotide
gcccctaacagatggatatgg

SEQ ID NO: 8231-8239 - skipped (9 entries)

SEQ ID NO: 8240 - DNA, 21 bp, Artificial Sequence
  Description of Artificial Sequence: Synthetic oligonucleotide
ggaccaggaccaggaagtaac

SEQ ID NO: 8241-8249 - skipped (9 entries)

SEQ ID NO: 8250 - DNA, 21 bp, Artificial Sequence
  Description of Artificial Sequence: Synthetic oligonucleotide
gggattcacgtggtggcggtg

SEQ ID NO: 8251-8259 - skipped (9 entries)

SEQ ID NO: 8260 - DNA, 21 bp, Artificial Sequence
  Description of Artificial Sequence: Synthetic oligonucleotide
gctttggggattcacgtggtg

SEQ ID NO: 8261-8269 - skipped (9 entries)

SEQ ID NO: 8270 - DNA, 21 bp, Artificial Sequence
  Description of Artificial Sequence: Synthetic oligonucleotide
ttgtaggcaactttggctttg

SEQ ID NO: 8271-8279 - skipped (9 entries)

SEQ ID NO: 8280 - DNA, 21 bp, Artificial Sequence
  Description of Artificial Sequence: Synthetic oligonucleotide
tctagacaagaaatgcaggaa

SEQ ID NO: 8281-8289 - skipped (9 entries)

SEQ ID NO: 8290 - DNA, 21 bp, Artificial Sequence
  Description of Artificial Sequence: Synthetic oligonucleotide
tctaacagaaaaagcggatgg

SEQ ID NO: 8291-8299 - skipped (9 entries)

SEQ ID NO: 8300 - DNA, 21 bp, Artificial Sequence
  Description of Artificial Sequence: Synthetic oligonucleotide
gcatagctcaccttgtcgtag

SEQ ID NO: 8301-8309 - skipped (9 entries)

SEQ ID NO: 8310 - DNA, 21 bp, Artificial Sequence
  Description of Artificial Sequence: Synthetic oligonucleotide
agcaggaggcagttgcaggac

SEQ ID NO: 8311-8319 - skipped (9 entries)

SEQ ID NO: 8320 - DNA, 21 bp, Artificial Sequence
  Description of Artificial Sequence: Synthetic oligonucleotide
tccttcccaagaattgaagag

SEQ ID NO: 8321-8329 - skipped (9 entries)

SEQ ID NO: 8330 - DNA, 21 bp, Artificial Sequence
  Description of Artificial Sequence: Synthetic oligonucleotide
cctttctccttcccaagaatt

SEQ ID NO: 8331-8339 - skipped (9 entries)

SEQ ID NO: 8340 - DNA, 21 bp, Artificial Sequence
  Description of Artificial Sequence: Synthetic oligonucleotide
tcctagatcaagactggtgcc

SEQ ID NO: 8341-8349 - skipped (9 entries)

SEQ ID NO: 8350 - DNA, 21 bp, Artificial Sequence
  Description of Artificial Sequence: Synthetic oligonucleotide
ttttctcctagatcaagactg

SEQ ID NO: 8351-8359 - skipped (9 entries)

SEQ ID NO: 8360 - DNA, 21 bp, Artificial Sequence
  Description of Artificial Sequence: Synthetic oligonucleotide
cttagtggtgtctatcgaaga

SEQ ID NO: 8361-8369 - skipped (9 entries)

SEQ ID NO: 8370 - DNA, 21 bp, Artificial Sequence
  Description of Artificial Sequence: Synthetic oligonucleotide
ctatatgttgacagggtggtg

SEQ ID NO: 8371-8379 - skipped (9 entries)

SEQ ID NO: 8380 - DNA, 21 bp, Artificial Sequence
  Description of Artificial Sequence: Synthetic oligonucleotide
aaggttggatggcaagcatgt

SEQ ID NO: 8381-8389 - skipped (9 entries)

SEQ ID NO: 8390 - DNA, 21 bp, Artificial Sequence
  Description of Artificial Sequence: Synthetic oligonucleotide
cctgtgaggtggccgccggca

SEQ ID NO: 8391-8399 - skipped (9 entries)

SEQ ID NO: 8400 - DNA, 21 bp, Artificial Sequence
  Description of Artificial Sequence: Synthetic oligonucleotide
accacctcagtgctcaagaac

SEQ ID NO: 8401-8409 - skipped (9 entries)

SEQ ID NO: 8410 - DNA, 21 bp, Artificial Sequence
  Description of Artificial Sequence: Synthetic oligonucleotide
tgtccctcgggcagcaacatc

SEQ ID NO: 8411-8419 - skipped (9 entries)

SEQ ID NO: 8420 - DNA, 21 bp, Artificial Sequence
  Description of Artificial Sequence: Synthetic oligonucleotide
ttgacaatgcgcccctcaggc

SEQ ID NO: 8421-8429 - skipped (9 entries)

SEQ ID NO: 8430 - DNA, 21 bp, Artificial Sequence
  Description of Artificial Sequence: Synthetic oligonucleotide
tagccgagtcgtccggaaatc

SEQ ID NO: 8431-8439 - skipped (9 entries)

SEQ ID NO: 8440 - DNA, 21 bp, Artificial Sequence
  Description of Artificial Sequence: Synthetic oligonucleotide
ttctgtgggttgatctgtatt

SEQ ID NO: 8441-8449 - skipped (9 entries)

SEQ ID NO: 8450 - DNA, 21 bp, Artificial Sequence
  Description of Artificial Sequence: Synthetic oligonucleotide
ccagcaccatcctgcaccttg

SEQ ID NO: 8451-8459 - skipped (9 entries)

SEQ ID NO: 8460 - DNA, 21 bp, Artificial Sequence
  Description of Artificial Sequence: Synthetic oligonucleotide
tctttgccagcaccatcctgc

SEQ ID NO: 8461-8469 - skipped (9 entries)

SEQ ID NO: 8470 - DNA, 21 bp, Artificial Sequence
  Description of Artificial Sequence: Synthetic oligonucleotide
ctgattttctctttgccagca

SEQ ID NO: 8471-8479 - skipped (9 entries)

SEQ ID NO: 8480 - DNA, 21 bp, Artificial Sequence
  Description of Artificial Sequence: Synthetic oligonucleotide
caaggcatctccccagagcga

SEQ ID NO: 8481-8489 - skipped (9 entries)

SEQ ID NO: 8490 - DNA, 21 bp, Artificial Sequence
  Description of Artificial Sequence: Synthetic oligonucleotide
cctgagaatacagatcaaccc

SEQ ID NO: 8491-8499 - skipped (9 entries)

SEQ ID NO: 8500 - DNA, 21 bp, Artificial Sequence
  Description of Artificial Sequence: Synthetic oligonucleotide
cttcttgtgcagtttgcctga

SEQ ID NO: 8501-8509 - skipped (9 entries)

SEQ ID NO: 8510 - DNA, 21 bp, Artificial Sequence
  Description of Artificial Sequence: Synthetic oligonucleotide
tgttttgcttcttgtgcagtt

SEQ ID NO: 8511-8519 - skipped (9 entries)

SEQ ID NO: 8520 - DNA, 21 bp, Artificial Sequence
  Description of Artificial Sequence: Synthetic oligonucleotide
tctcgggcttcatctcttgtg

SEQ ID NO: 8521-8529 - skipped (9 entries)

SEQ ID NO: 8530 - DNA, 21 bp, Artificial Sequence
  Description of Artificial Sequence: Synthetic oligonucleotide
gcggttcttagaagagtactt

SEQ ID NO: 8531-8539 - skipped (9 entries)

SEQ ID NO: 8540 - DNA, 21 bp, Artificial Sequence
  Description of Artificial Sequence: Synthetic oligonucleotide
tgaagaccctcactggcaaaa

SEQ ID NO: 8541-8549 - skipped (9 entries)

SEQ ID NO: 8550 - DNA, 21 bp, Artificial Sequence
  Description of Artificial Sequence: Synthetic oligonucleotide
ccagtgagggtcttcacaaag

SEQ ID NO: 8551-8559 - skipped (9 entries)

SEQ ID NO: 8560 - DNA, 21 bp, Artificial Sequence
  Description of Artificial Sequence: Synthetic oligonucleotide
tgggcaagctggcggagagaa

SEQ ID NO: 8561-8569 - skipped (9 entries)

SEQ ID NO: 8570 - DNA, 21 bp, Artificial Sequence
  Description of Artificial Sequence: Synthetic oligonucleotide
accttcttcttgggacgcagg

SEQ ID NO: 8571-8579 - skipped (9 entries)

SEQ ID NO: 8580 - DNA, 21 bp, Artificial Sequence
  Description of Artificial Sequence: Synthetic oligonucleotide
taggtgaaaaggtttactttt

SEQ ID NO: 8581-8589 - skipped (9 entries)

SEQ ID NO: 8590 - DNA, 21 bp, Artificial Sequence
  Description of Artificial Sequence: Synthetic oligonucleotide
tgatttaaaaagcatacctgg

SEQ ID NO: 8591-8599 - skipped (9 entries)

SEQ ID NO: 8600 - DNA, 21 bp, Artificial Sequence
  Description of Artificial Sequence: Synthetic oligonucleotide
aaaagcatacctggatcaatg

SEQ ID NO: 8601-8609 - skipped (9 entries)

SEQ ID NO: 8610 - DNA, 21 bp, Artificial Sequence
  Description of Artificial Sequence: Synthetic oligonucleotide
ggtgactctgacatcattaga

SEQ ID NO: 8611-8619 - skipped (9 entries)

SEQ ID NO: 8620 - DNA, 21 bp, Artificial Sequence
  Description of Artificial Sequence: Synthetic oligonucleotide
ttttttaggtgactctgacat

SEQ ID NO: 8621-8629 - skipped (9 entries)

SEQ ID NO: 8630 - DNA, 21 bp, Artificial Sequence
  Description of Artificial Sequence: Synthetic oligonucleotide
tttttattttttaggtgactc

SEQ ID NO: 8631-8639 - skipped (9 entries)

SEQ ID NO: 8640 - DNA, 21 bp, Artificial Sequence
  Description of Artificial Sequence: Synthetic oligonucleotide
gttcccaaaggaaatctgaaa

SEQ ID NO: 8641-8649 - skipped (9 entries)

SEQ ID NO: 8650 - DNA, 21 bp, Artificial Sequence
  Description of Artificial Sequence: Synthetic oligonucleotide
cccattttggttcccaaagga

SEQ ID NO: 8651-8659 - skipped (9 entries)

SEQ ID NO: 8660 - DNA, 21 bp, Artificial Sequence
  Description of Artificial Sequence: Synthetic oligonucleotide
tagaaaaagtcgctggagtcg

SEQ ID NO: 8661-8669 - skipped (9 entries)

SEQ ID NO: 8670 - DNA, 21 bp, Artificial Sequence
  Description of Artificial Sequence: Synthetic oligonucleotide
ctttgtagaaaaagtcgctgg

SEQ ID NO: 8671-8679 - skipped (9 entries)

SEQ ID NO: 8680 - DNA, 21 bp, Artificial Sequence
  Description of Artificial Sequence: Synthetic oligonucleotide
atgtttgctttgtagaaaaag

SEQ ID NO: 8681-8689 - skipped (9 entries)

SEQ ID NO: 8690 - DNA, 21 bp, Artificial Sequence
  Description of Artificial Sequence: Synthetic oligonucleotide
cgcctgccgcccccggatggg

SEQ ID NO: 8691-8699 - skipped (9 entries)

SEQ ID NO: 8700 - DNA, 21 bp, Artificial Sequence
  Description of Artificial Sequence: Synthetic oligonucleotide
tcccaccgctttccgagcccg

SEQ ID NO: 8701-8709 - skipped (9 entries)

SEQ ID NO: 8710 - DNA, 21 bp, Artificial Sequence
  Description of Artificial Sequence: Synthetic oligonucleotide
cgagcccgcttgcacctcggc

SEQ ID NO: 8711-8719 - skipped (9 entries)

SEQ ID NO: 8720 - DNA, 21 bp, Artificial Sequence
  Description of Artificial Sequence: Synthetic oligonucleotide
tggcgtcgctcctgtgctgtg

SEQ ID NO: 8721-8729 - skipped (9 entries)

SEQ ID NO: 8730 - DNA, 21 bp, Artificial Sequence
  Description of Artificial Sequence: Synthetic oligonucleotide
tgttgcagcctcggaaaattg

SEQ ID NO: 8731-8739 - skipped (9 entries)

SEQ ID NO: 8740 - DNA, 21 bp, Artificial Sequence
  Description of Artificial Sequence: Synthetic oligonucleotide
tctctttccctctaggtttgg

SEQ ID NO: 8741-8749 - skipped (9 entries)

SEQ ID NO: 8750 - DNA, 21 bp, Artificial Sequence
  Description of Artificial Sequence: Synthetic oligonucleotide
cctctaggtttggcagtgaag

SEQ ID NO: 8751-8759 - skipped (9 entries)

SEQ ID NO: 8760 - DNA, 21 bp, Artificial Sequence
  Description of Artificial Sequence: Synthetic oligonucleotide
gtcgggctgtgagcaggaagt

SEQ ID NO: 8761-8769 - skipped (9 entries)

SEQ ID NO: 8770 - DNA, 21 bp, Artificial Sequence
  Description of Artificial Sequence: Synthetic oligonucleotide
ttctttctattgtcttccagg

SEQ ID NO: 8771-8779 - skipped (9 entries)

SEQ ID NO: 8780 - DNA, 21 bp, Artificial Sequence
  Description of Artificial Sequence: Synthetic oligonucleotide
tattgtcttccaggcaccatt

SEQ ID NO: 8781-8789 - skipped (9 entries)

SEQ ID NO: 8790 - DNA, 21 bp, Artificial Sequence
  Description of Artificial Sequence: Synthetic oligonucleotide
gctaaagttctttcagtcatc

SEQ ID NO: 8791-8799 - skipped (9 entries)

SEQ ID NO: 8800 - DNA, 21 bp, Artificial Sequence
  Description of Artificial Sequence: Synthetic oligonucleotide
cccatcagcaggactagcgct

SEQ ID NO: 8801-8809 - skipped (9 entries)

SEQ ID NO: 8810 - DNA, 21 bp, Artificial Sequence
  Description of Artificial Sequence: Synthetic oligonucleotide
ctcctcctccagcgctagtcc

SEQ ID NO: 8811-8819 - skipped (9 entries)

SEQ ID NO: 8820 - DNA, 21 bp, Artificial Sequence
  Description of Artificial Sequence: Synthetic oligonucleotide
tctttcctcctcctccagcgc

SEQ ID NO: 8821-8829 - skipped (9 entries)

SEQ ID NO: 8830 - DNA, 21 bp, Artificial Sequence
  Description of Artificial Sequence: Synthetic oligonucleotide
gcatggatcttcgtaccaaga

SEQ ID NO: 8831-8839 - skipped (9 entries)

SEQ ID NO: 8840 - DNA, 21 bp, Artificial Sequence
  Description of Artificial Sequence: Synthetic oligonucleotide
tcctcataatctgtagactga

SEQ ID NO: 8841-8849 - skipped (9 entries)

SEQ ID NO: 8850 - DNA, 21 bp, Artificial Sequence
  Description of Artificial Sequence: Synthetic oligonucleotide
tctttcctatcctttcaggct

SEQ ID NO: 8851-8859 - skipped (9 entries)

SEQ ID NO: 8860 - DNA, 21 bp, Artificial Sequence
  Description of Artificial Sequence: Synthetic oligonucleotide
ctatcctttcaggctattgag

SEQ ID NO: 8861-8869 - skipped (9 entries)

SEQ ID NO: 8870 - DNA, 21 bp, Artificial Sequence
  Description of Artificial Sequence: Synthetic oligonucleotide
aggctattgagggcacctaca

SEQ ID NO: 8871-8879 - skipped (9 entries)

SEQ ID NO: 8880 - DNA, 21 bp, Artificial Sequence
  Description of Artificial Sequence: Synthetic oligonucleotide
ttctgaggttccccgcacctc

SEQ ID NO: 8881-8889 - skipped (9 entries)

SEQ ID NO: 8890 - DNA, 23 bp, Artificial Sequence
  Description of Artificial Sequence: Synthetic oligonucleotide
cccagctctcataccatgagtcc

SEQ ID NO: 8891-8899 - skipped (9 entries)

SEQ ID NO: 8900 - DNA, 23 bp, Artificial Sequence
  Description of Artificial Sequence: Synthetic oligonucleotide
tatccacagtgaatcttggttgt

SEQ ID NO: 8901-8909 - skipped (9 entries)

SEQ ID NO: 8910 - DNA, 23 bp, Artificial Sequence
  Description of Artificial Sequence: Synthetic oligonucleotide
cacttcgtgcccgaaacgccgaa

SEQ ID NO: 8911-8919 - skipped (9 entries)

SEQ ID NO: 8920 - DNA, 23 bp, Artificial Sequence
  Description of Artificial Sequence: Synthetic oligonucleotide
tctctgaccattgtagcggtttg

SEQ ID NO: 8921-8929 - skipped (9 entries)

SEQ ID NO: 8930 - DNA, 23 bp, Artificial Sequence
  Description of Artificial Sequence: Synthetic oligonucleotide
tagcggtttgctgcggtaatcat

SEQ ID NO: 8931-8939 - skipped (9 entries)

SEQ ID NO: 8940 - DNA, 23 bp, Artificial Sequence
  Description of Artificial Sequence: Synthetic oligonucleotide
tcagttctgggaaaatggtgtgc

SEQ ID NO: 8941-8949 - skipped (9 entries)

SEQ ID NO: 8950 - DNA, 23 bp, Artificial Sequence
  Description of Artificial Sequence: Synthetic oligonucleotide
agaatatggtggggagctgtgat

SEQ ID NO: 8951-8959 - skipped (9 entries)

SEQ ID NO: 8960 - DNA, 23 bp, Artificial Sequence
  Description of Artificial Sequence: Synthetic oligonucleotide
tccttctagttatgagccagagt

SEQ ID NO: 8961-8969 - skipped (9 entries)

SEQ ID NO: 8970 - DNA, 23 bp, Artificial Sequence
  Description of Artificial Sequence: Synthetic oligonucleotide
cctggtttaatctacagaatgat

SEQ ID NO: 8971-8979 - skipped (9 entries)

SEQ ID NO: 8980 - DNA, 23 bp, Artificial Sequence
  Description of Artificial Sequence: Synthetic oligonucleotide
ttctccttatttttgtttctgga

SEQ ID NO: 8981-8989 - skipped (9 entries)

SEQ ID NO: 8990 - DNA, 23 bp, Artificial Sequence
  Description of Artificial Sequence: Synthetic oligonucleotide
ttgtttctggaaaagttgtatta

SEQ ID NO: 8991-8999 - skipped (9 entries)

SEQ ID NO: 9000 - DNA, 23 bp, Artificial Sequence
  Description of Artificial Sequence: Synthetic oligonucleotide
atgaagcatttgaaaacatctac

SEQ ID NO: 9001-9009 - skipped (9 entries)

SEQ ID NO: 9010 - DNA, 23 bp, Artificial Sequence
  Description of Artificial Sequence: Synthetic oligonucleotide
taaagggattcaggaagacgacg

SEQ ID NO: 9011-9019 - skipped (9 entries)

SEQ ID NO: 9020 - DNA, 23 bp, Artificial Sequence
  Description of Artificial Sequence: Synthetic oligonucleotide
ggcgtttcgggcacgaagtgcaa

SEQ ID NO: 9021-9029 - skipped (9 entries)

SEQ ID NO: 9030 - DNA, 23 bp, Artificial Sequence
  Description of Artificial Sequence: Synthetic oligonucleotide
tattcggcgtttcgggcacgaag

SEQ ID NO: 9031-9039 - skipped (9 entries)

SEQ ID NO: 9040 - DNA, 23 bp, Artificial Sequence
  Description of Artificial Sequence: Synthetic oligonucleotide
aaatagatctaaccttgggatta

SEQ ID NO: 9041-9049 - skipped (9 entries)

SEQ ID NO: 9050 - DNA, 23 bp, Artificial Sequence
  Description of Artificial Sequence: Synthetic oligonucleotide
tcccagaactgaaaatcagtgcc

SEQ ID NO: 9051-9059 - skipped (9 entries)

SEQ ID NO: 9060 - DNA, 23 bp, Artificial Sequence
  Description of Artificial Sequence: Synthetic oligonucleotide
cttacggctacctcttggctcct

SEQ ID NO: 9061-9069 - skipped (9 entries)

SEQ ID NO: 9070 - DNA, 23 bp, Artificial Sequence
  Description of Artificial Sequence: Synthetic oligonucleotide
tcttgctgccagtctggactgtt

SEQ ID NO: 9071-9079 - skipped (9 entries)

SEQ ID NO: 9080 - DNA, 23 bp, Artificial Sequence
  Description of Artificial Sequence: Synthetic oligonucleotide
tgaatcttgaagtccaagaactt

SEQ ID NO: 9081-9089 - skipped (9 entries)

SEQ ID NO: 9090 - DNA, 23 bp, Artificial Sequence
  Description of Artificial Sequence: Synthetic oligonucleotide
ttggtgggtgagcacaaggcctt

SEQ ID NO: 9091-9099 - skipped (9 entries)

SEQ ID NO: 9100 - DNA, 23 bp, Artificial Sequence
  Description of Artificial Sequence: Synthetic oligonucleotide
cagacttacctactaaattgttg

SEQ ID NO: 9101-9109 - skipped (9 entries)

SEQ ID NO: 9110 - DNA, 23 bp, Artificial Sequence
  Description of Artificial Sequence: Synthetic oligonucleotide
aaccaggaaataactctggctca

SEQ ID NO: 9111-9119 - skipped (9 entries)

SEQ ID NO: 9120 - DNA, 23 bp, Artificial Sequence
  Description of Artificial Sequence: Synthetic oligonucleotide
tgtagattaaaccaggaaataac

SEQ ID NO: 9121-9129 - skipped (9 entries)

SEQ ID NO: 9130 - DNA, 23 bp, Artificial Sequence
  Description of Artificial Sequence: Synthetic oligonucleotide
tgggtttgatcattctgtagatt

SEQ ID NO: 9131-9139 - skipped (9 entries)

SEQ ID NO: 9140 - DNA, 23 bp, Artificial Sequence
  Description of Artificial Sequence: Synthetic oligonucleotide
ctgctctgactttagcacctaag

SEQ ID NO: 9141-9149 - skipped (9 entries)

SEQ ID NO: 9150 - DNA, 23 bp, Artificial Sequence
  Description of Artificial Sequence: Synthetic oligonucleotide
cgtcgtcttcctgaatcccttta

SEQ ID NO: 9151-9159 - skipped (9 entries)

SEQ ID NO: 9160 - DNA, 23 bp, Artificial Sequence
  Description of Artificial Sequence: Synthetic oligonucleotide
tagtgagtggcggccctgggact

SEQ ID NO: 9161-9169 - skipped (9 entries)

SEQ ID NO: 9170 - DNA, 23 bp, Artificial Sequence
  Description of Artificial Sequence: Synthetic oligonucleotide
ccagagtgcatgagctcggagct

SEQ ID NO: 9171-9179 - skipped (9 entries)

SEQ ID NO: 9180 - DNA, 23 bp, Artificial Sequence
  Description of Artificial Sequence: Synthetic oligonucleotide
tatctacaacctggacgagagtg

SEQ ID NO: 9181-9189 - skipped (9 entries)

SEQ ID NO: 9190 - DNA, 23 bp, Artificial Sequence
  Description of Artificial Sequence: Synthetic oligonucleotide
cctggacttctgcactgccaggg

SEQ ID NO: 9191-9199 - skipped (9 entries)

SEQ ID NO: 9200 - DNA, 23 bp, Artificial Sequence
  Description of Artificial Sequence: Synthetic oligonucleotide
ctgacagctctttggggagttcc

SEQ ID NO: 9201-9209 - skipped (9 entries)

SEQ ID NO: 9210 - DNA, 23 bp, Artificial Sequence
  Description of Artificial Sequence: Synthetic oligonucleotide
agctggagaagcccaagcccatc

SEQ ID NO: 9211-9219 - skipped (9 entries)

SEQ ID NO: 9220 - DNA, 23 bp, Artificial Sequence
  Description of Artificial Sequence: Synthetic oligonucleotide
tcaccccactgctgcaccagatt

SEQ ID NO: 9221-9229 - skipped (9 entries)

SEQ ID NO: 9230 - DNA, 23 bp, Artificial Sequence
  Description of Artificial Sequence: Synthetic oligonucleotide
atgaagataaattgatagcacaa

SEQ ID NO: 9231-9239 - skipped (9 entries)

SEQ ID NO: 9240 - DNA, 23 bp, Artificial Sequence
  Description of Artificial Sequence: Synthetic oligonucleotide
atagcacaaaatctagaacttaa

SEQ ID NO: 9241-9249 - skipped (9 entries)

SEQ ID NO: 9250 - DNA, 23 bp, Artificial Sequence
  Description of Artificial Sequence: Synthetic oligonucleotide
gtttgactaagcttaattgcttt

SEQ ID NO: 9251-9259 - skipped (9 entries)

SEQ ID NO: 9260 - DNA, 23 bp, Artificial Sequence
  Description of Artificial Sequence: Synthetic oligonucleotide
ctttctggaacaggatctgaaac

SEQ ID NO: 9261-9269 - skipped (9 entries)

SEQ ID NO: 9270 - DNA, 23 bp, Artificial Sequence
  Description of Artificial Sequence: Synthetic oligonucleotide
atacccatcaacactggtaagaa

SEQ ID NO: 9271-9279 - skipped (9 entries)

SEQ ID NO: 9280 - DNA, 23 bp, Artificial Sequence
  Description of Artificial Sequence: Synthetic oligonucleotide
ttcatcaattggcggggttccat

SEQ ID NO: 9281-9289 - skipped (9 entries)

SEQ ID NO: 9290 - DNA, 23 bp, Artificial Sequence
  Description of Artificial Sequence: Synthetic oligonucleotide
gcggggttccatttttccaggta

SEQ ID NO: 9291-9299 - skipped (9 entries)

SEQ ID NO: 9300 - DNA, 23 bp, Artificial Sequence
  Description of Artificial Sequence: Synthetic oligonucleotide
tcccgccttaaatccacagcata

SEQ ID NO: 9301-9309 - skipped (9 entries)

SEQ ID NO: 9310 - DNA, 23 bp, Artificial Sequence
  Description of Artificial Sequence: Synthetic oligonucleotide
acacactggagaggtctaaagtg

SEQ ID NO: 9311-9319 - skipped (9 entries)

SEQ ID NO: 9320 - DNA, 23 bp, Artificial Sequence
  Description of Artificial Sequence: Synthetic oligonucleotide
cctctgcgagcccagatcaacct

SEQ ID NO: 9321-9329 - skipped (9 entries)

SEQ ID NO: 9330 - DNA, 23 bp, Artificial Sequence
  Description of Artificial Sequence: Synthetic oligonucleotide
agttctagattttgtgctatcaa

SEQ ID NO: 9331-9339 - skipped (9 entries)

SEQ ID NO: 9340 - DNA, 23 bp, Artificial Sequence
  Description of Artificial Sequence: Synthetic oligonucleotide
ttatggtttcattaagttctaga

SEQ ID NO: 9341-9349 - skipped (9 entries)

SEQ ID NO: 9350 - DNA, 23 bp, Artificial Sequence
  Description of Artificial Sequence: Synthetic oligonucleotide
agcttagtcaaaccaatttttat

SEQ ID NO: 9351-9359 - skipped (9 entries)

SEQ ID NO: 9360 - DNA, 23 bp, Artificial Sequence
  Description of Artificial Sequence: Synthetic oligonucleotide
ctcttttaaagtacctgttggga

SEQ ID NO: 9361-9369 - skipped (9 entries)

SEQ ID NO: 9370 - DNA, 23 bp, Artificial Sequence
  Description of Artificial Sequence: Synthetic oligonucleotide
tatttctcttttaaagtacctgt

SEQ ID NO: 9371-9379 - skipped (9 entries)

SEQ ID NO: 9380 - DNA, 23 bp, Artificial Sequence
  Description of Artificial Sequence: Synthetic oligonucleotide
acagctcaggctgtttccttttc

SEQ ID NO: 9381-9389 - skipped (9 entries)

SEQ ID NO: 9390 - DNA, 23 bp, Artificial Sequence
  Description of Artificial Sequence: Synthetic oligonucleotide
tctcttctttgttgttttctgaa

SEQ ID NO: 9391-9399 - skipped (9 entries)

SEQ ID NO: 9400 - DNA, 23 bp, Artificial Sequence
  Description of Artificial Sequence: Synthetic oligonucleotide
accggaattgtctcttctttgtt

SEQ ID NO: 9401-9409 - skipped (9 entries)

SEQ ID NO: 9410 - DNA, 23 bp, Artificial Sequence
  Description of Artificial Sequence: Synthetic oligonucleotide
atgaacaatccacaccagcatct

SEQ ID NO: 9411-9419 - skipped (9 entries)

SEQ ID NO: 9420 - DNA, 23 bp, Artificial Sequence
  Description of Artificial Sequence: Synthetic oligonucleotide
aaggttgatctgggctcgcagag

SEQ ID NO: 9421-9429 - skipped (9 entries)

SEQ ID NO: 9430 - DNA, 23 bp, Artificial Sequence
  Description of Artificial Sequence: Synthetic oligonucleotide
ccaacccccaagtgaattaaagg

SEQ ID NO: 9431-9439 - skipped (9 entries)

SEQ ID NO: 9440 - DNA, 21 bp, Artificial Sequence
  Description of Artificial Sequence: Synthetic oligonucleotide
tcttctaggtatgacaacgaa

SEQ ID NO: 9441-9449 - skipped (9 entries)

SEQ ID NO: 9450 - DNA, 21 bp, Artificial Sequence
  Description of Artificial Sequence: Synthetic oligonucleotide
ccagctctcataccatgagtc

SEQ ID NO: 9451-9459 - skipped (9 entries)

SEQ ID NO: 9460 - DNA, 21 bp, Artificial Sequence
  Description of Artificial Sequence: Synthetic oligonucleotide
tgcccgaaacgccgaatataa

SEQ ID NO: 9461-9469 - skipped (9 entries)

SEQ ID NO: 9470 - DNA, 21 bp, Artificial Sequence
  Description of Artificial Sequence: Synthetic oligonucleotide
ctctgaccattgtagcggttt

SEQ ID NO: 9471-9479 - skipped (9 entries)

SEQ ID NO: 9480 - DNA, 21 bp, Artificial Sequence
  Description of Artificial Sequence: Synthetic oligonucleotide
gttctgggaaaatggtgtgca

SEQ ID NO: 9481-9489 - skipped (9 entries)

SEQ ID NO: 9490 - DNA, 21 bp, Artificial Sequence
  Description of Artificial Sequence: Synthetic oligonucleotide
gggaaaatggtgtgcacagga

SEQ ID NO: 9491-9499 - skipped (9 entries)

SEQ ID NO: 9500 - DNA, 21 bp, Artificial Sequence
  Description of Artificial Sequence: Synthetic oligonucleotide
tttccctagtgaagaacagtc

SEQ ID NO: 9501-9509 - skipped (9 entries)

SEQ ID NO: 9510 - DNA, 21 bp, Artificial Sequence
  Description of Artificial Sequence: Synthetic oligonucleotide
ctagtgaagaacagtccagac

SEQ ID NO: 9511-9519 - skipped (9 entries)

SEQ ID NO: 9520 - DNA, 21 bp, Artificial Sequence
  Description of Artificial Sequence: Synthetic oligonucleotide
agctaagttcttggacttcaa

SEQ ID NO: 9521-9529 - skipped (9 entries)

SEQ ID NO: 9530 - DNA, 21 bp, Artificial Sequence
  Description of Artificial Sequence: Synthetic oligonucleotide
tggacttcaagattcagaata

SEQ ID NO: 9531-9539 - skipped (9 entries)

SEQ ID NO: 9540 - DNA, 21 bp, Artificial Sequence
  Description of Artificial Sequence: Synthetic oligonucleotide
agattcagaatatggtgggga

SEQ ID NO: 9541-9549 - skipped (9 entries)

SEQ ID NO: 9550 - DNA, 21 bp, Artificial Sequence
  Description of Artificial Sequence: Synthetic oligonucleotide
gaatatggtggggagctgtga

SEQ ID NO: 9551-9559 - skipped (9 entries)

SEQ ID NO: 9560 - DNA, 21 bp, Artificial Sequence
  Description of Artificial Sequence: Synthetic oligonucleotide
tataaggttagaaggccttgt

SEQ ID NO: 9561-9569 - skipped (9 entries)

SEQ ID NO: 9570 - DNA, 21 bp, Artificial Sequence
  Description of Artificial Sequence: Synthetic oligonucleotide
ttctagttatgagccagagtt

SEQ ID NO: 9571-9579 - skipped (9 entries)

SEQ ID NO: 9580 - DNA, 21 bp, Artificial Sequence
  Description of Artificial Sequence: Synthetic oligonucleotide
agttatgagccagagttattt

SEQ ID NO: 9581-9589 - skipped (9 entries)

SEQ ID NO: 9590 - DNA, 21 bp, Artificial Sequence
  Description of Artificial Sequence: Synthetic oligonucleotide
tggtttaatctacagaatgat

SEQ ID NO: 9591-9599 - skipped (9 entries)

SEQ ID NO: 9600 - DNA, 21 bp, Artificial Sequence
  Description of Artificial Sequence: Synthetic oligonucleotide
ccttatttttgtttctggaaa

SEQ ID NO: 9601-9609 - skipped (9 entries)

SEQ ID NO: 9610 - DNA, 21 bp, Artificial Sequence
  Description of Artificial Sequence: Synthetic oligonucleotide
ggaaaagttgtattaacaggt

SEQ ID NO: 9611-9619 - skipped (9 entries)

SEQ ID NO: 9620 - DNA, 21 bp, Artificial Sequence
  Description of Artificial Sequence: Synthetic oligonucleotide
taggtgctaaagtcagagcag

SEQ ID NO: 9621-9629 - skipped (9 entries)

SEQ ID NO: 9630 - DNA, 21 bp, Artificial Sequence
  Description of Artificial Sequence: Synthetic oligonucleotide
aaagggattcaggaagacgac

SEQ ID NO: 9631-9639 - skipped (9 entries)

SEQ ID NO: 9640 - DNA, 21 bp, Artificial Sequence
  Description of Artificial Sequence: Synthetic oligonucleotide
ggcacgaagtgcaatggtctt

SEQ ID NO: 9641-9649 - skipped (9 entries)

SEQ ID NO: 9650 - DNA, 21 bp, Artificial Sequence
  Description of Artificial Sequence: Synthetic oligonucleotide
gcgtttcgggcacgaagtgca

SEQ ID NO: 9651-9659 - skipped (9 entries)

SEQ ID NO: 9660 - DNA, 21 bp, Artificial Sequence
  Description of Artificial Sequence: Synthetic oligonucleotide
tggctctcttatcctcatgat

SEQ ID NO: 9661-9669 - skipped (9 entries)

SEQ ID NO: 9670 - DNA, 21 bp, Artificial Sequence
  Description of Artificial Sequence: Synthetic oligonucleotide
cagaactgaaaatcagtgccg

SEQ ID NO: 9671-9679 - skipped (9 entries)

SEQ ID NO: 9680 - DNA, 21 bp, Artificial Sequence
  Description of Artificial Sequence: Synthetic oligonucleotide
tacggctacctcttggctcct

SEQ ID NO: 9681-9689 - skipped (9 entries)

SEQ ID NO: 9690 - DNA, 21 bp, Artificial Sequence
  Description of Artificial Sequence: Synthetic oligonucleotide
tgctgccagtctggactgttc

SEQ ID NO: 9691-9699 - skipped (9 entries)

SEQ ID NO: 9700 - DNA, 21 bp, Artificial Sequence
  Description of Artificial Sequence: Synthetic oligonucleotide
gtacaactctagcatattttc

SEQ ID NO: 9701-9709 - skipped (9 entries)

SEQ ID NO: 9710 - DNA, 21 bp, Artificial Sequence
  Description of Artificial Sequence: Synthetic oligonucleotide
gaatcttgaagtccaagaact

SEQ ID NO: 9711-9719 - skipped (9 entries)

SEQ ID NO: 9720 - DNA, 21 bp, Artificial Sequence
  Description of Artificial Sequence: Synthetic oligonucleotide
catcacagctccccaccatat

SEQ ID NO: 9721-9729 - skipped (9 entries)

SEQ ID NO: 9730 - DNA, 21 bp, Artificial Sequence
  Description of Artificial Sequence: Synthetic oligonucleotide
aaccttataggaaacttcaca

SEQ ID NO: 9731-9739 - skipped (9 entries)

SEQ ID NO: 9740 - DNA, 21 bp, Artificial Sequence
  Description of Artificial Sequence: Synthetic oligonucleotide
gacttacctactaaattgttg

SEQ ID NO: 9741-9749 - skipped (9 entries)

SEQ ID NO: 9750 - DNA, 21 bp, Artificial Sequence
  Description of Artificial Sequence: Synthetic oligonucleotide
gtagattaaaccaggaaataa

SEQ ID NO: 9751-9759 - skipped (9 entries)

SEQ ID NO: 9760 - DNA, 21 bp, Artificial Sequence
  Description of Artificial Sequence: Synthetic oligonucleotide
gggtttgatcattctgtagat

SEQ ID NO: 9761-9769 - skipped (9 entries)

SEQ ID NO: 9770 - DNA, 21 bp, Artificial Sequence
  Description of Artificial Sequence: Synthetic oligonucleotide
agaaacaaaaataaggagaac

SEQ ID NO: 9771-9779 - skipped (9 entries)

SEQ ID NO: 9780 - DNA, 21 bp, Artificial Sequence
  Description of Artificial Sequence: Synthetic oligonucleotide
tgttacaacttacctgttaat

SEQ ID NO: 9781-9789 - skipped (9 entries)

SEQ ID NO: 9790 - DNA, 21 bp, Artificial Sequence
  Description of Artificial Sequence: Synthetic oligonucleotide
gctctgactttagcacctaag

SEQ ID NO: 9791-9799 - skipped (9 entries)

SEQ ID NO: 9800 - DNA, 21 bp, Artificial Sequence
  Description of Artificial Sequence: Synthetic oligonucleotide
taaatttctgctctgacttta

SEQ ID NO: 9801-9809 - skipped (9 entries)

SEQ ID NO: 9810 - DNA, 21 bp, Artificial Sequence
  Description of Artificial Sequence: Synthetic oligonucleotide
aatgcttcataaatttctgct

SEQ ID NO: 9811-9819 - skipped (9 entries)

SEQ ID NO: 9820 - DNA, 21 bp, Artificial Sequence
  Description of Artificial Sequence: Synthetic oligonucleotide
tgaatccctttagaatagggt

SEQ ID NO: 9821-9829 - skipped (9 entries)

SEQ ID NO: 9830 - DNA, 21 bp, Artificial Sequence
  Description of Artificial Sequence: Synthetic oligonucleotide
ctcccactgggcccaacaaca

SEQ ID NO: 9831-9839 - skipped (9 entries)

SEQ ID NO: 9840 - DNA, 21 bp, Artificial Sequence
  Description of Artificial Sequence: Synthetic oligonucleotide
gccctgctggacagcagcagc

SEQ ID NO: 9841-9849 - skipped (9 entries)

SEQ ID NO: 9850 - DNA, 21 bp, Artificial Sequence
  Description of Artificial Sequence: Synthetic oligonucleotide
tccggacccaacccttctacc

SEQ ID NO: 9851-9859 - skipped (9 entries)

SEQ ID NO: 9860 - DNA, 21 bp, Artificial Sequence
  Description of Artificial Sequence: Synthetic oligonucleotide
acctcctttgagcccatcaag

SEQ ID NO: 9861-9869 - skipped (9 entries)

SEQ ID NO: 9870 - DNA, 21 bp, Artificial Sequence
  Description of Artificial Sequence: Synthetic oligonucleotide
tgtttttcagttttggaactc

SEQ ID NO: 9871-9879 - skipped (9 entries)

SEQ ID NO: 9880 - DNA, 21 bp, Artificial Sequence
  Description of Artificial Sequence: Synthetic oligonucleotide
gttttggaactccccaaagag

SEQ ID NO: 9881-9889 - skipped (9 entries)

SEQ ID NO: 9890 - DNA, 21 bp, Artificial Sequence
  Description of Artificial Sequence: Synthetic oligonucleotide
cagagtgcatgagctcggagc

SEQ ID NO: 9891-9899 - skipped (9 entries)

SEQ ID NO: 9900 - DNA, 21 bp, Artificial Sequence
  Description of Artificial Sequence: Synthetic oligonucleotide
tctttctccacccccgggaga

SEQ ID NO: 9901-9909 - skipped (9 entries)

SEQ ID NO: 9910 - DNA, 21 bp, Artificial Sequence
  Description of Artificial Sequence: Synthetic oligonucleotide
ccacccccgggagaccacgat

SEQ ID NO: 9911-9919 - skipped (9 entries)

SEQ ID NO: 9920 - DNA, 21 bp, Artificial Sequence
  Description of Artificial Sequence: Synthetic oligonucleotide
gcactgccagggacagcagtg

SEQ ID NO: 9921-9929 - skipped (9 entries)

SEQ ID NO: 9930 - DNA, 21 bp, Artificial Sequence
  Description of Artificial Sequence: Synthetic oligonucleotide
ctggacttctgcactgccagg

SEQ ID NO: 9931-9939 - skipped (9 entries)

SEQ ID NO: 9940 - DNA, 21 bp, Artificial Sequence
  Description of Artificial Sequence: Synthetic oligonucleotide
gacagctctttggggagttcc

SEQ ID NO: 9941-9949 - skipped (9 entries)

SEQ ID NO: 9950 - DNA, 21 bp, Artificial Sequence
  Description of Artificial Sequence: Synthetic oligonucleotide
gaggacatcaactcctccagc

SEQ ID NO: 9951-9959 - skipped (9 entries)

SEQ ID NO: 9960 - DNA, 21 bp, Artificial Sequence
  Description of Artificial Sequence: Synthetic oligonucleotide
agggccacccaccttctgagg

SEQ ID NO: 9961-9969 - skipped (9 entries)

SEQ ID NO: 9970 - DNA, 21 bp, Artificial Sequence
  Description of Artificial Sequence: Synthetic oligonucleotide
ctctcgtccaggttgtagata

SEQ ID NO: 9971-9979 - skipped (9 entries)

SEQ ID NO: 9980 - DNA, 21 bp, Artificial Sequence
  Description of Artificial Sequence: Synthetic oligonucleotide
cccacttgtaggtgccctcat

SEQ ID NO: 9981-9989 - skipped (9 entries)

SEQ ID NO: 9990 - DNA, 21 bp, Artificial Sequence
  Description of Artificial Sequence: Synthetic oligonucleotide
tcagctcgtctgcctccgtgg

SEQ ID NO: 9991-9999 - skipped (9 entries)

SEQ ID NO: 10000 - DNA, 21 bp, Artificial Sequence
  Description of Artificial Sequence: Synthetic oligonucleotide
tcacctgccataaatataggg

SEQ ID NO: 10001-10009 - skipped (9 entries)

SEQ ID NO: 10010 - DNA, 21 bp, Artificial Sequence
  Description of Artificial Sequence: Synthetic oligonucleotide
ccagctcaatctggtgcagca

SEQ ID NO: 10011-10019 - skipped (9 entries)

SEQ ID NO: 10020 - DNA, 21 bp, Artificial Sequence
  Description of Artificial Sequence: Synthetic oligonucleotide
ctgtagggcaccttgtatctg

SEQ ID NO: 10021-10029 - skipped (9 entries)

SEQ ID NO: 10030 - DNA, 21 bp, Artificial Sequence
  Description of Artificial Sequence: Synthetic oligonucleotide
tggtcatcatcttggtgtaca

SEQ ID NO: 10031-10039 - skipped (9 entries)

SEQ ID NO: 10040 - DNA, 21 bp, Artificial Sequence
  Description of Artificial Sequence: Synthetic oligonucleotide
gggccttgccgcagcgcagga

SEQ ID NO: 10041-10049 - skipped (9 entries)

SEQ ID NO: 10050 - DNA, 21 bp, Artificial Sequence
  Description of Artificial Sequence: Synthetic oligonucleotide
agtatgagggcacctacaagt

SEQ ID NO: 10051-10059 - skipped (9 entries)

SEQ ID NO: 10060 - DNA, 21 bp, Artificial Sequence
  Description of Artificial Sequence: Synthetic oligonucleotide
ccccactgctgcaccagattg

SEQ ID NO: 10061-10069 - skipped (9 entries)

SEQ ID NO: 10070 - DNA, 21 bp, Artificial Sequence
  Description of Artificial Sequence: Synthetic oligonucleotide
gcgggagccagatgcacttcg

SEQ ID NO: 10071-10079 - skipped (9 entries)

SEQ ID NO: 10080 - DNA, 21 bp, Artificial Sequence
  Description of Artificial Sequence: Synthetic oligonucleotide
accccgaggagtcggagctgg

SEQ ID NO: 10081-10089 - skipped (9 entries)

SEQ ID NO: 10090 - DNA, 21 bp, Artificial Sequence
  Description of Artificial Sequence: Synthetic oligonucleotide
tcaaccccgaggagtcggagc

SEQ ID NO: 10091-10099 - skipped (9 entries)

SEQ ID NO: 10100 - DNA, 21 bp, Artificial Sequence
  Description of Artificial Sequence: Synthetic oligonucleotide
accagcagtgcaagcgcaacg

SEQ ID NO: 10101-10109 - skipped (9 entries)

SEQ ID NO: 10110 - DNA, 21 bp, Artificial Sequence
  Description of Artificial Sequence: Synthetic oligonucleotide
atgatgtggccggcgacatct

SEQ ID NO: 10111-10119 - skipped (9 entries)

SEQ ID NO: 10120 - DNA, 21 bp, Artificial Sequence
  Description of Artificial Sequence: Synthetic oligonucleotide
tcctgcgctgcggcaaggccc

SEQ ID NO: 10121-10129 - skipped (9 entries)

SEQ ID NO: 10130 - DNA, 21 bp, Artificial Sequence
  Description of Artificial Sequence: Synthetic oligonucleotide
gccacgtaggggtgcccttca

SEQ ID NO: 10131-10139 - skipped (9 entries)

SEQ ID NO: 10140 - DNA, 21 bp, Artificial Sequence
  Description of Artificial Sequence: Synthetic oligonucleotide
ggaacaggatctgaaactgga

SEQ ID NO: 10141-10149 - skipped (9 entries)

SEQ ID NO: 10150 - DNA, 21 bp, Artificial Sequence
  Description of Artificial Sequence: Synthetic oligonucleotide
gaaaacaacaaagaagagaca

SEQ ID NO: 10151-10159 - skipped (9 entries)

SEQ ID NO: 10160 - DNA, 21 bp, Artificial Sequence
  Description of Artificial Sequence: Synthetic oligonucleotide
tcttttaggatgtggatgtag

SEQ ID NO: 10161-10169 - skipped (9 entries)

SEQ ID NO: 10170 - DNA, 21 bp, Artificial Sequence
  Description of Artificial Sequence: Synthetic oligonucleotide
tttaggatgtggatgtagaag

SEQ ID NO: 10171-10179 - skipped (9 entries)

SEQ ID NO: 10180 - DNA, 21 bp, Artificial Sequence
  Description of Artificial Sequence: Synthetic oligonucleotide
ggggcagtatactgaagaacc

SEQ ID NO: 10181-10189 - skipped (9 entries)

SEQ ID NO: 10190 - DNA, 21 bp, Artificial Sequence
  Description of Artificial Sequence: Synthetic oligonucleotide
tcaattggcggggttccattt

SEQ ID NO: 10191-10199 - skipped (9 entries)

SEQ ID NO: 10200 - DNA, 21 bp, Artificial Sequence
  Description of Artificial Sequence: Synthetic oligonucleotide
cgccttaaatccacagcataa

SEQ ID NO: 10201-10209 - skipped (9 entries)

SEQ ID NO: 10210 - DNA, 21 bp, Artificial Sequence
  Description of Artificial Sequence: Synthetic oligonucleotide
agattttgtgctatcaattta

SEQ ID NO: 10211-10219 - skipped (9 entries)

SEQ ID NO: 10220 - DNA, 21 bp, Artificial Sequence
  Description of Artificial Sequence: Synthetic oligonucleotide
ttaagttctagattttgtgct

SEQ ID NO: 10221-10229 - skipped (9 entries)

SEQ ID NO: 10230 - DNA, 21 bp, Artificial Sequence
  Description of Artificial Sequence: Synthetic oligonucleotide
agaaagcaattaagcttagtc

SEQ ID NO: 10231-10239 - skipped (9 entries)

SEQ ID NO: 10240 - DNA, 21 bp, Artificial Sequence
  Description of Artificial Sequence: Synthetic oligonucleotide
gatcctgttccagaaagcaat

SEQ ID NO: 10241-10249 - skipped (9 entries)

SEQ ID NO: 10250 - DNA, 21 bp, Artificial Sequence
  Description of Artificial Sequence: Synthetic oligonucleotide
cttttaaagtacctgttggga

SEQ ID NO: 10251-10259 - skipped (9 entries)

SEQ ID NO: 10260 - DNA, 21 bp, Artificial Sequence
  Description of Artificial Sequence: Synthetic oligonucleotide
atttctcttttaaagtacctg

SEQ ID NO: 10261-10269 - skipped (9 entries)

SEQ ID NO: 10270 - DNA, 21 bp, Artificial Sequence
  Description of Artificial Sequence: Synthetic oligonucleotide
tctgtggtgtcgtacctttaa

SEQ ID NO: 10271-10279 - skipped (9 entries)

SEQ ID NO: 10280 - DNA, 21 bp, Artificial Sequence
  Description of Artificial Sequence: Synthetic oligonucleotide
taccagtgttgatgggtataa

SEQ ID NO: 10281-10289 - skipped (9 entries)

SEQ ID NO: 10290 - DNA, 21 bp, Artificial Sequence
  Description of Artificial Sequence: Synthetic oligonucleotide
gttcttaccagtgttgatggg

SEQ ID NO: 10291-10299 - skipped (9 entries)

SEQ ID NO: 10300 - DNA, 21 bp, Artificial Sequence
  Description of Artificial Sequence: Synthetic oligonucleotide
cgtggttcagttcttaccagt

SEQ ID NO: 10301-10309 - skipped (9 entries)

SEQ ID NO: 10310 - DNA, 21 bp, Artificial Sequence
  Description of Artificial Sequence: Synthetic oligonucleotide
gctgatcaaggagatgttcac

SEQ ID NO: 10311-10319 - skipped (9 entries)

SEQ ID NO: 10320 - DNA, 21 bp, Artificial Sequence
  Description of Artificial Sequence: Synthetic oligonucleotide
ttttcagctgatcaaggagat

SEQ ID NO: 10321-10329 - skipped (9 entries)

SEQ ID NO: 10330 - DNA, 21 bp, Artificial Sequence
  Description of Artificial Sequence: Synthetic oligonucleotide
gaacagtttagcatcattaac

SEQ ID NO: 10331-10339 - skipped (9 entries)

SEQ ID NO: 10340 - DNA, 21 bp, Artificial Sequence
  Description of Artificial Sequence: Synthetic oligonucleotide
ttgttgttttctgaacagttt

SEQ ID NO: 10341-10349 - skipped (9 entries)

SEQ ID NO: 10350 - DNA, 21 bp, Artificial Sequence
  Description of Artificial Sequence: Synthetic oligonucleotide
gtatactgccccagaactgcc

SEQ ID NO: 10351-10359 - skipped (9 entries)

SEQ ID NO: 10360 - DNA, 21 bp, Artificial Sequence
  Description of Artificial Sequence: Synthetic oligonucleotide
tcagtatactgccccagaact

SEQ ID NO: 10361-10369 - skipped (9 entries)

SEQ ID NO: 10370 - DNA, 21 bp, Artificial Sequence
  Description of Artificial Sequence: Synthetic oligonucleotide
atgtgattttttatgctgtgg

SEQ ID NO: 10371-10379 - skipped (9 entries)

SEQ ID NO: 10380 - DNA, 21 bp, Artificial Sequence
  Description of Artificial Sequence: Synthetic oligonucleotide
ttgtcttttccatgtgatttt

SEQ ID NO: 10381-10389 - skipped (9 entries)

SEQ ID NO: 10390 - DNA, 21 bp, Artificial Sequence
  Description of Artificial Sequence: Synthetic oligonucleotide
actttagacctctccagtgtg

SEQ ID NO: 10391-10399 - skipped (9 entries)

SEQ ID NO: 10400 - DNA, 21 bp, Artificial Sequence
  Description of Artificial Sequence: Synthetic oligonucleotide
tccactttagacctctccagt

SEQ ID NO: 10401-10409 - skipped (9 entries)

SEQ ID NO: 10410 - DNA, 21 bp, Artificial Sequence
  Description of Artificial Sequence: Synthetic oligonucleotide
tgcagaccacagtccatgcca

SEQ ID NO: 10411-10419 - skipped (9 entries)

SEQ ID NO: 10420 - DNA, 21 bp, Artificial Sequence
  Description of Artificial Sequence: Synthetic oligonucleotide
gcagaccacagtccatgccat

SEQ ID NO: 10421-10429 - skipped (9 entries)

SEQ ID NO: 10430 - DNA, 21 bp, Artificial Sequence
  Description of Artificial Sequence: Synthetic oligonucleotide
cagaccacagtccatgccatc

SEQ ID NO: 10431-10439 - skipped (9 entries)

SEQ ID NO: 10440 - DNA, 21 bp, Artificial Sequence
  Description of Artificial Sequence: Synthetic oligonucleotide
tcatcttctaggtatgacaac

SEQ ID NO: 10441-10449 - skipped (9 entries)

SEQ ID NO: 10450 - DNA, 21 bp, Artificial Sequence
  Description of Artificial Sequence: Synthetic oligonucleotide
catcttctaggtatgacaacg

SEQ ID NO: 10451-10459 - skipped (9 entries)

SEQ ID NO: 10460 - DNA, 21 bp, Artificial Sequence
  Description of Artificial Sequence: Synthetic oligonucleotide
atcttctaggtatgacaacga

SEQ ID NO: 10461-10469 - skipped (9 entries)

SEQ ID NO: 10470 - DNA, 21 bp, Artificial Sequence
  Description of Artificial Sequence: Synthetic oligonucleotide
taggtatgacaacgaatttgg

SEQ ID NO: 10471-10479 - skipped (9 entries)

SEQ ID NO: 10480 - DNA, 21 bp, Artificial Sequence
  Description of Artificial Sequence: Synthetic oligonucleotide
cccagctctcataccatgagt

SEQ ID NO: 10481-10489 - skipped (9 entries)

SEQ ID NO: 10490 - DNA, 21 bp, Artificial Sequence
  Description of Artificial Sequence: Synthetic oligonucleotide
tatccacagtgaatcttggtt

SEQ ID NO: 10491-10499 - skipped (9 entries)

SEQ ID NO: 10500 - DNA, 21 bp, Artificial Sequence
  Description of Artificial Sequence: Synthetic oligonucleotide
gttgtaaacttgacctaaaga

SEQ ID NO: 10501-10509 - skipped (9 entries)

SEQ ID NO: 10510 - DNA, 21 bp, Artificial Sequence
  Description of Artificial Sequence: Synthetic oligonucleotide
taaacttgacctaaagaccat

SEQ ID NO: 10511-10519 - skipped (9 entries)

SEQ ID NO: 10520 - DNA, 21 bp, Artificial Sequence
  Description of Artificial Sequence: Synthetic oligonucleotide
acctaaagaccattgcacttc

SEQ ID NO: 10521-10529 - skipped (9 entries)

SEQ ID NO: 10530 - DNA, 21 bp, Artificial Sequence
  Description of Artificial Sequence: Synthetic oligonucleotide
cacttcgtgcccgaaacgccg

SEQ ID NO: 10531-10539 - skipped (9 entries)

SEQ ID NO: 10540 - DNA, 21 bp, Artificial Sequence
  Description of Artificial Sequence: Synthetic oligonucleotide
gtgcccgaaacgccgaatata

SEQ ID NO: 10541-10549 - skipped (9 entries)

SEQ ID NO: 10550 - DNA, 21 bp, Artificial Sequence
  Description of Artificial Sequence: Synthetic oligonucleotide
tctctgaccattgtagcggtt

SEQ ID NO: 10551-10559 - skipped (9 entries)

SEQ ID NO: 10560 - DNA, 21 bp, Artificial Sequence
  Description of Artificial Sequence: Synthetic oligonucleotide
tagcggtttgctgcggtaatc

SEQ ID NO: 10561-10569 - skipped (9 entries)

SEQ ID NO: 10570 - DNA, 21 bp, Artificial Sequence
  Description of Artificial Sequence: Synthetic oligonucleotide
gctgcggtaatcatgaggata

SEQ ID NO: 10571-10579 - skipped (9 entries)

SEQ ID NO: 10580 - DNA, 21 bp, Artificial Sequence
  Description of Artificial Sequence: Synthetic oligonucleotide
ctgcggtaatcatgaggataa

SEQ ID NO: 10581-10589 - skipped (9 entries)

SEQ ID NO: 10590 - DNA, 21 bp, Artificial Sequence
  Description of Artificial Sequence: Synthetic oligonucleotide
tcagttctgggaaaatggtgt

SEQ ID NO: 10591-10599 - skipped (9 entries)

SEQ ID NO: 10600 - DNA, 21 bp, Artificial Sequence
  Description of Artificial Sequence: Synthetic oligonucleotide
cagttctgggaaaatggtgtg

SEQ ID NO: 10601-10609 - skipped (9 entries)

SEQ ID NO: 10610 - DNA, 21 bp, Artificial Sequence
  Description of Artificial Sequence: Synthetic oligonucleotide
agttctgggaaaatggtgtgc

SEQ ID NO: 10611-10619 - skipped (9 entries)

SEQ ID NO: 10620 - DNA, 21 bp, Artificial Sequence
  Description of Artificial Sequence: Synthetic oligonucleotide
tgggaaaatggtgtgcacagg

SEQ ID NO: 10621-10629 - skipped (9 entries)

SEQ ID NO: 10630 - DNA, 21 bp, Artificial Sequence
  Description of Artificial Sequence: Synthetic oligonucleotide
tttcctttccctagtgaagaa

SEQ ID NO: 10631-10639 - skipped (9 entries)

SEQ ID NO: 10640 - DNA, 21 bp, Artificial Sequence
  Description of Artificial Sequence: Synthetic oligonucleotide
ttcctttccctagtgaagaac

SEQ ID NO: 10641-10649 - skipped (9 entries)

SEQ ID NO: 10650 - DNA, 21 bp, Artificial Sequence
  Description of Artificial Sequence: Synthetic oligonucleotide
tcctttccctagtgaagaaca

SEQ ID NO: 10651-10659 - skipped (9 entries)

SEQ ID NO: 10660 - DNA, 21 bp, Artificial Sequence
  Description of Artificial Sequence: Synthetic oligonucleotide
cctttccctagtgaagaacag

SEQ ID NO: 10661-10669 - skipped (9 entries)

SEQ ID NO: 10670 - DNA, 21 bp, Artificial Sequence
  Description of Artificial Sequence: Synthetic oligonucleotide
ctttccctagtgaagaacagt

SEQ ID NO: 10671-10679 - skipped (9 entries)

SEQ ID NO: 10680 - DNA, 21 bp, Artificial Sequence
  Description of Artificial Sequence: Synthetic oligonucleotide
ccctagtgaagaacagtccag

SEQ ID NO: 10681-10689 - skipped (9 entries)

SEQ ID NO: 10690 - DNA, 21 bp, Artificial Sequence
  Description of Artificial Sequence: Synthetic oligonucleotide
cctagtgaagaacagtccaga

SEQ ID NO: 10691-10699 - skipped (9 entries)

SEQ ID NO: 10700 - DNA, 21 bp, Artificial Sequence
  Description of Artificial Sequence: Synthetic oligonucleotide
tacagaagttgggttttccag

SEQ ID NO: 10701-10709 - skipped (9 entries)

SEQ ID NO: 10710 - DNA, 21 bp, Artificial Sequence
  Description of Artificial Sequence: Synthetic oligonucleotide
ggttttccagctaagttcttg

SEQ ID NO: 10711-10719 - skipped (9 entries)

SEQ ID NO: 10720 - DNA, 21 bp, Artificial Sequence
  Description of Artificial Sequence: Synthetic oligonucleotide
tccagctaagttcttggactt

SEQ ID NO: 10721-10729 - skipped (9 entries)

SEQ ID NO: 10730 - DNA, 21 bp, Artificial Sequence
  Description of Artificial Sequence: Synthetic oligonucleotide
ccagctaagttcttggacttc

SEQ ID NO: 10731-10739 - skipped (9 entries)

SEQ ID NO: 10740 - DNA, 21 bp, Artificial Sequence
  Description of Artificial Sequence: Synthetic oligonucleotide
cagctaagttcttggacttca

SEQ ID NO: 10741-10749 - skipped (9 entries)

SEQ ID NO: 10750 - DNA, 21 bp, Artificial Sequence
  Description of Artificial Sequence: Synthetic oligonucleotide
ttggacttcaagattcagaat

SEQ ID NO: 10751-10759 - skipped (9 entries)

SEQ ID NO: 10760 - DNA, 21 bp, Artificial Sequence
  Description of Artificial Sequence: Synthetic oligonucleotide
gacttcaagattcagaatatg

SEQ ID NO: 10761-10769 - skipped (9 entries)

SEQ ID NO: 10770 - DNA, 21 bp, Artificial Sequence
  Description of Artificial Sequence: Synthetic oligonucleotide
aagattcagaatatggtgggg

SEQ ID NO: 10771-10779 - skipped (9 entries)

SEQ ID NO: 10780 - DNA, 21 bp, Artificial Sequence
  Description of Artificial Sequence: Synthetic oligonucleotide
agaatatggtggggagctgtg

SEQ ID NO: 10781-10789 - skipped (9 entries)

SEQ ID NO: 10790 - DNA, 21 bp, Artificial Sequence
  Description of Artificial Sequence: Synthetic oligonucleotide
cctataaggttagaaggcctt

SEQ ID NO: 10791-10799 - skipped (9 entries)

SEQ ID NO: 10800 - DNA, 21 bp, Artificial Sequence
  Description of Artificial Sequence: Synthetic oligonucleotide
ctataaggttagaaggccttg

SEQ ID NO: 10801-10809 - skipped (9 entries)

SEQ ID NO: 10810 - DNA, 21 bp, Artificial Sequence
  Description of Artificial Sequence: Synthetic oligonucleotide
tgctcacccaccaacaattta

SEQ ID NO: 10811-10819 - skipped (9 entries)

SEQ ID NO: 10820 - DNA, 21 bp, Artificial Sequence
  Description of Artificial Sequence: Synthetic oligonucleotide
ttgcaattttccttctagtta

SEQ ID NO: 10821-10829 - skipped (9 entries)

SEQ ID NO: 10830 - DNA, 21 bp, Artificial Sequence
  Description of Artificial Sequence: Synthetic oligonucleotide
tgcaattttccttctagttat

SEQ ID NO: 10831-10839 - skipped (9 entries)

SEQ ID NO: 10840 - DNA, 21 bp, Artificial Sequence
  Description of Artificial Sequence: Synthetic oligonucleotide
gcaattttccttctagttatg

SEQ ID NO: 10841-10849 - skipped (9 entries)

SEQ ID NO: 10850 - DNA, 21 bp, Artificial Sequence
  Description of Artificial Sequence: Synthetic oligonucleotide
caattttccttctagttatga

SEQ ID NO: 10851-10859 - skipped (9 entries)

SEQ ID NO: 10860 - DNA, 21 bp, Artificial Sequence
  Description of Artificial Sequence: Synthetic oligonucleotide
tccttctagttatgagccaga

SEQ ID NO: 10861-10869 - skipped (9 entries)

SEQ ID NO: 10870 - DNA, 21 bp, Artificial Sequence
  Description of Artificial Sequence: Synthetic oligonucleotide
ccttctagttatgagccagag

SEQ ID NO: 10871-10879 - skipped (9 entries)

SEQ ID NO: 10880 - DNA, 21 bp, Artificial Sequence
  Description of Artificial Sequence: Synthetic oligonucleotide
cttctagttatgagccagagt

SEQ ID NO: 10881-10889 - skipped (9 entries)

SEQ ID NO: 10890 - DNA, 21 bp, Artificial Sequence
  Description of Artificial Sequence: Synthetic oligonucleotide
tagttatgagccagagttatt

SEQ ID NO: 10891-10899 - skipped (9 entries)

SEQ ID NO: 10900 - DNA, 21 bp, Artificial Sequence
  Description of Artificial Sequence: Synthetic oligonucleotide
tgagccagagttatttcctgg

SEQ ID NO: 10901-10909 - skipped (9 entries)

SEQ ID NO: 10910 - DNA, 21 bp, Artificial Sequence
  Description of Artificial Sequence: Synthetic oligonucleotide
cctggtttaatctacagaatg

SEQ ID NO: 10911-10919 - skipped (9 entries)

SEQ ID NO: 10920 - DNA, 21 bp, Artificial Sequence
  Description of Artificial Sequence: Synthetic oligonucleotide
ctggtttaatctacagaatga

SEQ ID NO: 10921-10929 - skipped (9 entries)

SEQ ID NO: 10930 - DNA, 21 bp, Artificial Sequence
  Description of Artificial Sequence: Synthetic oligonucleotide
aatctacagaatgatcaaacc

SEQ ID NO: 10931-10939 - skipped (9 entries)

SEQ ID NO: 10940 - DNA, 21 bp, Artificial Sequence
  Description of Artificial Sequence: Synthetic oligonucleotide
atctacagaatgatcaaaccc

SEQ ID NO: 10941-10949 - skipped (9 entries)

SEQ ID NO: 10950 - DNA, 21 bp, Artificial Sequence
  Description of Artificial Sequence: Synthetic oligonucleotide
ttctccttatttttgtttctg

SEQ ID NO: 10951-10959 - skipped (9 entries)

SEQ ID NO: 10960 - DNA, 21 bp, Artificial Sequence
  Description of Artificial Sequence: Synthetic oligonucleotide
tccttatttttgtttctggaa

SEQ ID NO: 10961-10969 - skipped (9 entries)

SEQ ID NO: 10970 - DNA, 21 bp, Artificial Sequence
  Description of Artificial Sequence: Synthetic oligonucleotide
tttttgtttctggaaaagttg

SEQ ID NO: 10971-10979 - skipped (9 entries)

SEQ ID NO: 10980 - DNA, 21 bp, Artificial Sequence
  Description of Artificial Sequence: Synthetic oligonucleotide
ttgtttctggaaaagttgtat

SEQ ID NO: 10981-10989 - skipped (9 entries)

SEQ ID NO: 10990 - DNA, 21 bp, Artificial Sequence
  Description of Artificial Sequence: Synthetic oligonucleotide
tgtttctggaaaagttgtatt

SEQ ID NO: 10991-10999 - skipped (9 entries)

SEQ ID NO: 11000 - DNA, 21 bp, Artificial Sequence
  Description of Artificial Sequence: Synthetic oligonucleotide
gtttctggaaaagttgtatta

SEQ ID NO: 11001-11009 - skipped (9 entries)

SEQ ID NO: 11010 - DNA, 21 bp, Artificial Sequence
  Description of Artificial Sequence: Synthetic oligonucleotide
tttctggaaaagttgtattaa

SEQ ID NO: 11011-11019 - skipped (9 entries)

SEQ ID NO: 11020 - DNA, 21 bp, Artificial Sequence
  Description of Artificial Sequence: Synthetic oligonucleotide
ctggaaaagttgtattaacag

SEQ ID NO: 11021-11029 - skipped (9 entries)

SEQ ID NO: 11030 - DNA, 21 bp, Artificial Sequence
  Description of Artificial Sequence: Synthetic oligonucleotide
tggaaaagttgtattaacagg

SEQ ID NO: 11031-11039 - skipped (9 entries)

SEQ ID NO: 11040 - DNA, 21 bp, Artificial Sequence
  Description of Artificial Sequence: Synthetic oligonucleotide
tcttcttaggtgctaaagtca

SEQ ID NO: 11041-11049 - skipped (9 entries)

SEQ ID NO: 11050 - DNA, 21 bp, Artificial Sequence
  Description of Artificial Sequence: Synthetic oligonucleotide
ttaggtgctaaagtcagagca

SEQ ID NO: 11051-11059 - skipped (9 entries)

SEQ ID NO: 11060 - DNA, 21 bp, Artificial Sequence
  Description of Artificial Sequence: Synthetic oligonucleotide
ggtgctaaagtcagagcagaa

SEQ ID NO: 11061-11069 - skipped (9 entries)

SEQ ID NO: 11070 - DNA, 21 bp, Artificial Sequence
  Description of Artificial Sequence: Synthetic oligonucleotide
taaagggattcaggaagacga

SEQ ID NO: 11071-11079 - skipped (9 entries)

SEQ ID NO: 11080 - DNA, 21 bp, Artificial Sequence
  Description of Artificial Sequence: Synthetic oligonucleotide
ggtcaagtttacaaccaagat

SEQ ID NO: 11081-11089 - skipped (9 entries)

SEQ ID NO: 11090 - DNA, 21 bp, Artificial Sequence
  Description of Artificial Sequence: Synthetic oligonucleotide
aggtcaagtttacaaccaaga

SEQ ID NO: 11091-11099 - skipped (9 entries)

SEQ ID NO: 11100 - DNA, 21 bp, Artificial Sequence
  Description of Artificial Sequence: Synthetic oligonucleotide
gggcacgaagtgcaatggtct

SEQ ID NO: 11101-11109 - skipped (9 entries)

SEQ ID NO: 11110 - DNA, 21 bp, Artificial Sequence
  Description of Artificial Sequence: Synthetic oligonucleotide
cgggcacgaagtgcaatggtc

SEQ ID NO: 11111-11119 - skipped (9 entries)

SEQ ID NO: 11120 - DNA, 21 bp, Artificial Sequence
  Description of Artificial Sequence: Synthetic oligonucleotide
ggcgtttcgggcacgaagtgc

SEQ ID NO: 11121-11129 - skipped (9 entries)

SEQ ID NO: 11130 - DNA, 21 bp, Artificial Sequence
  Description of Artificial Sequence: Synthetic oligonucleotide
tattcggcgtttcgggcacga

SEQ ID NO: 11131-11139 - skipped (9 entries)

SEQ ID NO: 11140 - DNA, 21 bp, Artificial Sequence
  Description of Artificial Sequence: Synthetic oligonucleotide
ggattatattcggcgtttcgg

SEQ ID NO: 11141-11149 - skipped (9 entries)

SEQ ID NO: 11150 - DNA, 21 bp, Artificial Sequence
  Description of Artificial Sequence: Synthetic oligonucleotide
aaatagatctaaccttgggat

SEQ ID NO: 11151-11159 - skipped (9 entries)

SEQ ID NO: 11160 - DNA, 21 bp, Artificial Sequence
  Description of Artificial Sequence: Synthetic oligonucleotide
tcctcatgattaccgcagcaa

SEQ ID NO: 11161-11169 - skipped (9 entries)

SEQ ID NO: 11170 - DNA, 21 bp, Artificial Sequence
  Description of Artificial Sequence: Synthetic oligonucleotide
gtggctctcttatcctcatga

SEQ ID NO: 11171-11179 - skipped (9 entries)

SEQ ID NO: 11180 - DNA, 21 bp, Artificial Sequence
  Description of Artificial Sequence: Synthetic oligonucleotide
ccagaactgaaaatcagtgcc

SEQ ID NO: 11181-11189 - skipped (9 entries)

SEQ ID NO: 11190 - DNA, 21 bp, Artificial Sequence
  Description of Artificial Sequence: Synthetic oligonucleotide
cccagaactgaaaatcagtgc

SEQ ID NO: 11191-11199 - skipped (9 entries)

SEQ ID NO: 11200 - DNA, 21 bp, Artificial Sequence
  Description of Artificial Sequence: Synthetic oligonucleotide
tcccagaactgaaaatcagtg

SEQ ID NO: 11201-11209 - skipped (9 entries)

SEQ ID NO: 11210 - DNA, 21 bp, Artificial Sequence
  Description of Artificial Sequence: Synthetic oligonucleotide
gctcctgtgcacaccattttc

SEQ ID NO: 11211-11219 - skipped (9 entries)

SEQ ID NO: 11220 - DNA, 21 bp, Artificial Sequence
  Description of Artificial Sequence: Synthetic oligonucleotide
cggctacctcttggctcctgt

SEQ ID NO: 11221-11229 - skipped (9 entries)

SEQ ID NO: 11230 - DNA, 21 bp, Artificial Sequence
  Description of Artificial Sequence: Synthetic oligonucleotide
ttacggctacctcttggctcc

SEQ ID NO: 11231-11239 - skipped (9 entries)

SEQ ID NO: 11240 - DNA, 21 bp, Artificial Sequence
  Description of Artificial Sequence: Synthetic oligonucleotide
cttacggctacctcttggctc

SEQ ID NO: 11241-11249 - skipped (9 entries)

SEQ ID NO: 11250 - DNA, 21 bp, Artificial Sequence
  Description of Artificial Sequence: Synthetic oligonucleotide
ctgccagtctggactgttctt

SEQ ID NO: 11251-11259 - skipped (9 entries)

SEQ ID NO: 11260 - DNA, 21 bp, Artificial Sequence
  Description of Artificial Sequence: Synthetic oligonucleotide
ttgctgccagtctggactgtt

SEQ ID NO: 11261-11269 - skipped (9 entries)

SEQ ID NO: 11270 - DNA, 21 bp, Artificial Sequence
  Description of Artificial Sequence: Synthetic oligonucleotide
cttgctgccagtctggactgt

SEQ ID NO: 11271-11279 - skipped (9 entries)

SEQ ID NO: 11280 - DNA, 21 bp, Artificial Sequence
  Description of Artificial Sequence: Synthetic oligonucleotide
tcttgctgccagtctggactg

SEQ ID NO: 11281-11289 - skipped (9 entries)

SEQ ID NO: 11290 - DNA, 21 bp, Artificial Sequence
  Description of Artificial Sequence: Synthetic oligonucleotide
tgtacaactctagcatatttt

SEQ ID NO: 11291-11299 - skipped (9 entries)

SEQ ID NO: 11300 - DNA, 21 bp, Artificial Sequence
  Description of Artificial Sequence: Synthetic oligonucleotide
gctggaaaacccaacttctgt

SEQ ID NO: 11301-11309 - skipped (9 entries)

SEQ ID NO: 11310 - DNA, 21 bp, Artificial Sequence
  Description of Artificial Sequence: Synthetic oligonucleotide
aagtccaagaacttagctgga

SEQ ID NO: 11311-11319 - skipped (9 entries)

SEQ ID NO: 11320 - DNA, 21 bp, Artificial Sequence
  Description of Artificial Sequence: Synthetic oligonucleotide
tgaatcttgaagtccaagaac

SEQ ID NO: 11321-11329 - skipped (9 entries)

SEQ ID NO: 11330 - DNA, 21 bp, Artificial Sequence
  Description of Artificial Sequence: Synthetic oligonucleotide
acatcacagctccccaccata

SEQ ID NO: 11331-11339 - skipped (9 entries)

SEQ ID NO: 11340 - DNA, 21 bp, Artificial Sequence
  Description of Artificial Sequence: Synthetic oligonucleotide
taaccttataggaaacttcac

SEQ ID NO: 11341-11349 - skipped (9 entries)

SEQ ID NO: 11350 - DNA, 21 bp, Artificial Sequence
  Description of Artificial Sequence: Synthetic oligonucleotide
gtgggtgagcacaaggccttc

SEQ ID NO: 11351-11359 - skipped (9 entries)

SEQ ID NO: 11360 - DNA, 21 bp, Artificial Sequence
  Description of Artificial Sequence: Synthetic oligonucleotide
ttggtgggtgagcacaaggcc

SEQ ID NO: 11361-11369 - skipped (9 entries)

SEQ ID NO: 11370 - DNA, 21 bp, Artificial Sequence
  Description of Artificial Sequence: Synthetic oligonucleotide
cctactaaattgttggtgggt

SEQ ID NO: 11371-11379 - skipped (9 entries)

SEQ ID NO: 11380 - DNA, 21 bp, Artificial Sequence
  Description of Artificial Sequence: Synthetic oligonucleotide
agacttacctactaaattgtt

SEQ ID NO: 11381-11389 - skipped (9 entries)

SEQ ID NO: 11390 - DNA, 21 bp, Artificial Sequence
  Description of Artificial Sequence: Synthetic oligonucleotide
cagacttacctactaaattgt

SEQ ID NO: 11391-11399 - skipped (9 entries)

SEQ ID NO: 11400 - DNA, 21 bp, Artificial Sequence
  Description of Artificial Sequence: Synthetic oligonucleotide
aaccaggaaataactctggct

SEQ ID NO: 11401-11409 - skipped (9 entries)

SEQ ID NO: 11410 - DNA, 21 bp, Artificial Sequence
  Description of Artificial Sequence: Synthetic oligonucleotide
tgtagattaaaccaggaaata

SEQ ID NO: 11411-11419 - skipped (9 entries)

SEQ ID NO: 11420 - DNA, 21 bp, Artificial Sequence
  Description of Artificial Sequence: Synthetic oligonucleotide
atcattctgtagattaaacca

SEQ ID NO: 11421-11429 - skipped (9 entries)

SEQ ID NO: 11430 - DNA, 21 bp, Artificial Sequence
  Description of Artificial Sequence: Synthetic oligonucleotide
gatcattctgtagattaaacc

SEQ ID NO: 11431-11439 - skipped (9 entries)

SEQ ID NO: 11440 - DNA, 21 bp, Artificial Sequence
  Description of Artificial Sequence: Synthetic oligonucleotide
tgggtttgatcattctgtaga

SEQ ID NO: 11441-11449 - skipped (9 entries)

SEQ ID NO: 11450 - DNA, 21 bp, Artificial Sequence
  Description of Artificial Sequence: Synthetic oligonucleotide
cagaaacaaaaataaggagaa

SEQ ID NO: 11451-11459 - skipped (9 entries)

SEQ ID NO: 11460 - DNA, 21 bp, Artificial Sequence
  Description of Artificial Sequence: Synthetic oligonucleotide
ccagaaacaaaaataaggaga

SEQ ID NO: 11461-11469 - skipped (9 entries)

SEQ ID NO: 11470 - DNA, 21 bp, Artificial Sequence
  Description of Artificial Sequence: Synthetic oligonucleotide
tccagaaacaaaaataaggag

SEQ ID NO: 11471-11479 - skipped (9 entries)

SEQ ID NO: 11480 - DNA, 21 bp, Artificial Sequence
  Description of Artificial Sequence: Synthetic oligonucleotide
atacaacttttccagaaacaa

SEQ ID NO: 11481-11489 - skipped (9 entries)

SEQ ID NO: 11490 - DNA, 21 bp, Artificial Sequence
  Description of Artificial Sequence: Synthetic oligonucleotide
cctgttaatacaacttttcca

SEQ ID NO: 11491-11499 - skipped (9 entries)

SEQ ID NO: 11500 - DNA, 21 bp, Artificial Sequence
  Description of Artificial Sequence: Synthetic oligonucleotide
caacttacctgttaatacaac

SEQ ID NO: 11501-11509 - skipped (9 entries)

SEQ ID NO: 11510 - DNA, 21 bp, Artificial Sequence
  Description of Artificial Sequence: Synthetic oligonucleotide
ctgttacaacttacctgttaa

SEQ ID NO: 11511-11519 - skipped (9 entries)

SEQ ID NO: 11520 - DNA, 21 bp, Artificial Sequence
  Description of Artificial Sequence: Synthetic oligonucleotide
tgctctgactttagcacctaa

SEQ ID NO: 11521-11529 - skipped (9 entries)

SEQ ID NO: 11530 - DNA, 21 bp, Artificial Sequence
  Description of Artificial Sequence: Synthetic oligonucleotide
ctgctctgactttagcaccta

SEQ ID NO: 11531-11539 - skipped (9 entries)

SEQ ID NO: 11540 - DNA, 21 bp, Artificial Sequence
  Description of Artificial Sequence: Synthetic oligonucleotide
ataaatttctgctctgacttt

SEQ ID NO: 11541-11549 - skipped (9 entries)

SEQ ID NO: 11550 - DNA, 21 bp, Artificial Sequence
  Description of Artificial Sequence: Synthetic oligonucleotide
aaatgcttcataaatttctgc

SEQ ID NO: 11551-11559 - skipped (9 entries)

SEQ ID NO: 11560 - DNA, 21 bp, Artificial Sequence
  Description of Artificial Sequence: Synthetic oligonucleotide
caaatgcttcataaatttctg

SEQ ID NO: 11561-11569 - skipped (9 entries)

SEQ ID NO: 11570 - DNA, 21 bp, Artificial Sequence
  Description of Artificial Sequence: Synthetic oligonucleotide
tcaaatgcttcataaatttct

SEQ ID NO: 11571-11579 - skipped (9 entries)

SEQ ID NO: 11580 - DNA, 21 bp, Artificial Sequence
  Description of Artificial Sequence: Synthetic oligonucleotide
ctgaatccctttagaataggg

SEQ ID NO: 11581-11589 - skipped (9 entries)

SEQ ID NO: 11590 - DNA, 21 bp, Artificial Sequence
  Description of Artificial Sequence: Synthetic oligonucleotide
cgtcgtcttcctgaatccctt

SEQ ID NO: 11591-11599 - skipped (9 entries)

SEQ ID NO: 11600 - DNA, 21 bp, Artificial Sequence
  Description of Artificial Sequence: Synthetic oligonucleotide
gggggctatcattgtagtgag

SEQ ID NO: 11601-11609 - skipped (9 entries)

SEQ ID NO: 11610 - DNA, 21 bp, Artificial Sequence
  Description of Artificial Sequence: Synthetic oligonucleotide
ggggctatcattgtagtgagt

SEQ ID NO: 11611-11619 - skipped (9 entries)

SEQ ID NO: 11620 - DNA, 21 bp, Artificial Sequence
  Description of Artificial Sequence: Synthetic oligonucleotide
tagtgagtggcggccctggga

SEQ ID NO: 11621-11629 - skipped (9 entries)

SEQ ID NO: 11630 - DNA, 21 bp, Artificial Sequence
  Description of Artificial Sequence: Synthetic oligonucleotide
actcccactgggcccaacaac

SEQ ID NO: 11631-11639 - skipped (9 entries)

SEQ ID NO: 11640 - DNA, 21 bp, Artificial Sequence
  Description of Artificial Sequence: Synthetic oligonucleotide
tgccctgctggacagcagcag

SEQ ID NO: 11641-11649 - skipped (9 entries)

SEQ ID NO: 11650 - DNA, 21 bp, Artificial Sequence
  Description of Artificial Sequence: Synthetic oligonucleotide
gtccggacccaacccttctac

SEQ ID NO: 11651-11659 - skipped (9 entries)

SEQ ID NO: 11660 - DNA, 21 bp, Artificial Sequence
  Description of Artificial Sequence: Synthetic oligonucleotide
tacctcctttgagcccatcaa

SEQ ID NO: 11661-11669 - skipped (9 entries)

SEQ ID NO: 11670 - DNA, 21 bp, Artificial Sequence
  Description of Artificial Sequence: Synthetic oligonucleotide
gagcccatcaaggcagacccc

SEQ ID NO: 11671-11679 - skipped (9 entries)

SEQ ID NO: 11680 - DNA, 21 bp, Artificial Sequence
  Description of Artificial Sequence: Synthetic oligonucleotide
agcccatcaaggcagacccca

SEQ ID NO: 11681-11689 - skipped (9 entries)

SEQ ID NO: 11690 - DNA, 21 bp, Artificial Sequence
  Description of Artificial Sequence: Synthetic oligonucleotide
cttgtttttcagttttggaac

SEQ ID NO: 11691-11699 - skipped (9 entries)

SEQ ID NO: 11700 - DNA, 21 bp, Artificial Sequence
  Description of Artificial Sequence: Synthetic oligonucleotide
tttttcagttttggaactccc

SEQ ID NO: 11701-11709 - skipped (9 entries)

SEQ ID NO: 11710 - DNA, 21 bp, Artificial Sequence
  Description of Artificial Sequence: Synthetic oligonucleotide
ttcagttttggaactccccaa

SEQ ID NO: 11711-11719 - skipped (9 entries)

SEQ ID NO: 11720 - DNA, 21 bp, Artificial Sequence
  Description of Artificial Sequence: Synthetic oligonucleotide
tcagttttggaactccccaaa

SEQ ID NO: 11721-11729 - skipped (9 entries)

SEQ ID NO: 11730 - DNA, 21 bp, Artificial Sequence
  Description of Artificial Sequence: Synthetic oligonucleotide
cagttttggaactccccaaag

SEQ ID NO: 11731-11739 - skipped (9 entries)

SEQ ID NO: 11740 - DNA, 21 bp, Artificial Sequence
  Description of Artificial Sequence: Synthetic oligonucleotide
agttttggaactccccaaaga

SEQ ID NO: 11741-11749 - skipped (9 entries)

SEQ ID NO: 11750 - DNA, 21 bp, Artificial Sequence
  Description of Artificial Sequence: Synthetic oligonucleotide
tggaactccccaaagagctgt

SEQ ID NO: 11751-11759 - skipped (9 entries)

SEQ ID NO: 11760 - DNA, 21 bp, Artificial Sequence
  Description of Artificial Sequence: Synthetic oligonucleotide
ggaactccccaaagagctgtc

SEQ ID NO: 11761-11769 - skipped (9 entries)

SEQ ID NO: 11770 - DNA, 21 bp, Artificial Sequence
  Description of Artificial Sequence: Synthetic oligonucleotide
ccagagtgcatgagctcggag

SEQ ID NO: 11771-11779 - skipped (9 entries)

SEQ ID NO: 11780 - DNA, 21 bp, Artificial Sequence
  Description of Artificial Sequence: Synthetic oligonucleotide
gcccctctgcttcgtctttct

SEQ ID NO: 11781-11789 - skipped (9 entries)

SEQ ID NO: 11790 - DNA, 21 bp, Artificial Sequence
  Description of Artificial Sequence: Synthetic oligonucleotide
cccctctgcttcgtctttctc

SEQ ID NO: 11791-11799 - skipped (9 entries)

SEQ ID NO: 11800 - DNA, 21 bp, Artificial Sequence
  Description of Artificial Sequence: Synthetic oligonucleotide
gtctttctccacccccgggag

SEQ ID NO: 11801-11809 - skipped (9 entries)

SEQ ID NO: 11810 - DNA, 21 bp, Artificial Sequence
  Description of Artificial Sequence: Synthetic oligonucleotide
ctccacccccgggagaccacg

SEQ ID NO: 11811-11819 - skipped (9 entries)

SEQ ID NO: 11820 - DNA, 21 bp, Artificial Sequence
  Description of Artificial Sequence: Synthetic oligonucleotide
tccacccccgggagaccacga

SEQ ID NO: 11821-11829 - skipped (9 entries)

SEQ ID NO: 11830 - DNA, 21 bp, Artificial Sequence
  Description of Artificial Sequence: Synthetic oligonucleotide
tatctacaacctggacgagag

SEQ ID NO: 11831-11839 - skipped (9 entries)

SEQ ID NO: 11840 - DNA, 21 bp, Artificial Sequence
  Description of Artificial Sequence: Synthetic oligonucleotide
gatgtgcctgttctcaacctc

SEQ ID NO: 11841-11849 - skipped (9 entries)

SEQ ID NO: 11850 - DNA, 21 bp, Artificial Sequence
  Description of Artificial Sequence: Synthetic oligonucleotide
atgtgcctgttctcaacctct

SEQ ID NO: 11851-11859 - skipped (9 entries)

SEQ ID NO: 11860 - DNA, 21 bp, Artificial Sequence
  Description of Artificial Sequence: Synthetic oligonucleotide
tgcactgccagggacagcagt

SEQ ID NO: 11861-11869 - skipped (9 entries)

SEQ ID NO: 11870 - DNA, 21 bp, Artificial Sequence
  Description of Artificial Sequence: Synthetic oligonucleotide
cctggacttctgcactgccag

SEQ ID NO: 11871-11879 - skipped (9 entries)

SEQ ID NO: 11880 - DNA, 21 bp, Artificial Sequence
  Description of Artificial Sequence: Synthetic oligonucleotide
ctatcagtcccagggccgcca

SEQ ID NO: 11881-11889 - skipped (9 entries)

SEQ ID NO: 11890 - DNA, 21 bp, Artificial Sequence
  Description of Artificial Sequence: Synthetic oligonucleotide
ggcccagtgggagtgaactga

SEQ ID NO: 11891-11899 - skipped (9 entries)

SEQ ID NO: 11900 - DNA, 21 bp, Artificial Sequence
  Description of Artificial Sequence: Synthetic oligonucleotide
ttgggcccagtgggagtgaac

SEQ ID NO: 11901-11909 - skipped (9 entries)

SEQ ID NO: 11910 - DNA, 21 bp, Artificial Sequence
  Description of Artificial Sequence: Synthetic oligonucleotide
ggtccggacgaactgctgctg

SEQ ID NO: 11911-11919 - skipped (9 entries)

SEQ ID NO: 11920 - DNA, 21 bp, Artificial Sequence
  Description of Artificial Sequence: Synthetic oligonucleotide
atgggctcaaaggaggtagaa

SEQ ID NO: 11921-11929 - skipped (9 entries)

SEQ ID NO: 11930 - DNA, 21 bp, Artificial Sequence
  Description of Artificial Sequence: Synthetic oligonucleotide
tgacagctctttggggagttc

SEQ ID NO: 11931-11939 - skipped (9 entries)

SEQ ID NO: 11940 - DNA, 21 bp, Artificial Sequence
  Description of Artificial Sequence: Synthetic oligonucleotide
ctgacagctctttggggagtt

SEQ ID NO: 11941-11949 - skipped (9 entries)

SEQ ID NO: 11950 - DNA, 21 bp, Artificial Sequence
  Description of Artificial Sequence: Synthetic oligonucleotide
tgaggacatcaactcctccag

SEQ ID NO: 11951-11959 - skipped (9 entries)

SEQ ID NO: 11960 - DNA, 21 bp, Artificial Sequence
  Description of Artificial Sequence: Synthetic oligonucleotide
cagggccacccaccttctgag

SEQ ID NO: 11961-11969 - skipped (9 entries)

SEQ ID NO: 11970 - DNA, 21 bp, Artificial Sequence
  Description of Artificial Sequence: Synthetic oligonucleotide
tagatataatcgtggtctccc

SEQ ID NO: 11971-11979 - skipped (9 entries)

SEQ ID NO: 11980 - DNA, 21 bp, Artificial Sequence
  Description of Artificial Sequence: Synthetic oligonucleotide
actctcgtccaggttgtagat

SEQ ID NO: 11981-11989 - skipped (9 entries)

SEQ ID NO: 11990 - DNA, 21 bp, Artificial Sequence
  Description of Artificial Sequence: Synthetic oligonucleotide
tgggggttcacccacttgtag

SEQ ID NO: 11991-11999 - skipped (9 entries)

SEQ ID NO: 12000 - DNA, 21 bp, Artificial Sequence
  Description of Artificial Sequence: Synthetic oligonucleotide
acccacttgtaggtgccctca

SEQ ID NO: 12001-12009 - skipped (9 entries)

SEQ ID NO: 12010 - DNA, 21 bp, Artificial Sequence
  Description of Artificial Sequence: Synthetic oligonucleotide
taggtgccctcatactggaaa

SEQ ID NO: 12011-12019 - skipped (9 entries)

SEQ ID NO: 12020 - DNA, 21 bp, Artificial Sequence
  Description of Artificial Sequence: Synthetic oligonucleotide
atcagctcgtctgcctccgtg

SEQ ID NO: 12021-12029 - skipped (9 entries)

SEQ ID NO: 12030 - DNA, 21 bp, Artificial Sequence
  Description of Artificial Sequence: Synthetic oligonucleotide
cctcacctgccataaatatag

SEQ ID NO: 12031-12039 - skipped (9 entries)

SEQ ID NO: 12040 - DNA, 21 bp, Artificial Sequence
  Description of Artificial Sequence: Synthetic oligonucleotide
ctcacctgccataaatatagg

SEQ ID NO: 12041-12049 - skipped (9 entries)

SEQ ID NO: 12050 - DNA, 21 bp, Artificial Sequence
  Description of Artificial Sequence: Synthetic oligonucleotide
ggcttctccagctcaatctgg

SEQ ID NO: 12051-12059 - skipped (9 entries)

SEQ ID NO: 12060 - DNA, 21 bp, Artificial Sequence
  Description of Artificial Sequence: Synthetic oligonucleotide
tccagctcaatctggtgcagc

SEQ ID NO: 12061-12069 - skipped (9 entries)

SEQ ID NO: 12070 - DNA, 21 bp, Artificial Sequence
  Description of Artificial Sequence: Synthetic oligonucleotide
tctgtagggcaccttgtatct

SEQ ID NO: 12071-12079 - skipped (9 entries)

SEQ ID NO: 12080 - DNA, 21 bp, Artificial Sequence
  Description of Artificial Sequence: Synthetic oligonucleotide
tatctgttgccgtaggtcagg

SEQ ID NO: 12081-12089 - skipped (9 entries)

SEQ ID NO: 12090 - DNA, 21 bp, Artificial Sequence
  Description of Artificial Sequence: Synthetic oligonucleotide
ccgtaggtcaggtccagctcc

SEQ ID NO: 12091-12099 - skipped (9 entries)

SEQ ID NO: 12100 - DNA, 21 bp, Artificial Sequence
  Description of Artificial Sequence: Synthetic oligonucleotide
aagaacatgcccggcttcttg

SEQ ID NO: 12101-12109 - skipped (9 entries)

SEQ ID NO: 12110 - DNA, 21 bp, Artificial Sequence
  Description of Artificial Sequence: Synthetic oligonucleotide
ttggtcatcatcttggtgtac

SEQ ID NO: 12111-12119 - skipped (9 entries)

SEQ ID NO: 12120 - DNA, 21 bp, Artificial Sequence
  Description of Artificial Sequence: Synthetic oligonucleotide
gtcatcatcttggtgtacacg

SEQ ID NO: 12121-12129 - skipped (9 entries)

SEQ ID NO: 12130 - DNA, 21 bp, Artificial Sequence
  Description of Artificial Sequence: Synthetic oligonucleotide
gtgtacacggcctcgttgggc

SEQ ID NO: 12131-12139 - skipped (9 entries)

SEQ ID NO: 12140 - DNA, 21 bp, Artificial Sequence
  Description of Artificial Sequence: Synthetic oligonucleotide
ggctgcacgcggatcaccagc

SEQ ID NO: 12141-12149 - skipped (9 entries)

SEQ ID NO: 12150 - DNA, 21 bp, Artificial Sequence
  Description of Artificial Sequence: Synthetic oligonucleotide
cgcttgcactgctggtggaag

SEQ ID NO: 12151-12159 - skipped (9 entries)

SEQ ID NO: 12160 - DNA, 21 bp, Artificial Sequence
  Description of Artificial Sequence: Synthetic oligonucleotide
cactgctggtggaagatgtcg

SEQ ID NO: 12161-12169 - skipped (9 entries)

SEQ ID NO: 12170 - DNA, 21 bp, Artificial Sequence
  Description of Artificial Sequence: Synthetic oligonucleotide
cgctcgttcagggccttgccg

SEQ ID NO: 12171-12179 - skipped (9 entries)

SEQ ID NO: 12180 - DNA, 21 bp, Artificial Sequence
  Description of Artificial Sequence: Synthetic oligonucleotide
agggccttgccgcagcgcagg

SEQ ID NO: 12181-12189 - skipped (9 entries)

SEQ ID NO: 12190 - DNA, 21 bp, Artificial Sequence
  Description of Artificial Sequence: Synthetic oligonucleotide
ccgcagcgcaggatgaagggc

SEQ ID NO: 12191-12199 - skipped (9 entries)

SEQ ID NO: 12200 - DNA, 21 bp, Artificial Sequence
  Description of Artificial Sequence: Synthetic oligonucleotide
cagtatgagggcacctacaag

SEQ ID NO: 12201-12209 - skipped (9 entries)

SEQ ID NO: 12210 - DNA, 21 bp, Artificial Sequence
  Description of Artificial Sequence: Synthetic oligonucleotide
ccagtatgagggcacctacaa

SEQ ID NO: 12211-12219 - skipped (9 entries)

SEQ ID NO: 12220 - DNA, 21 bp, Artificial Sequence
  Description of Artificial Sequence: Synthetic oligonucleotide
agctggagaagcccaagccca

SEQ ID NO: 12221-12229 - skipped (9 entries)

SEQ ID NO: 12230 - DNA, 21 bp, Artificial Sequence
  Description of Artificial Sequence: Synthetic oligonucleotide
accccactgctgcaccagatt

SEQ ID NO: 12231-12239 - skipped (9 entries)

SEQ ID NO: 12240 - DNA, 21 bp, Artificial Sequence
  Description of Artificial Sequence: Synthetic oligonucleotide
caccccactgctgcaccagat

SEQ ID NO: 12241-12249 - skipped (9 entries)

SEQ ID NO: 12250 - DNA, 21 bp, Artificial Sequence
  Description of Artificial Sequence: Synthetic oligonucleotide
tcaccccactgctgcaccaga

SEQ ID NO: 12251-12259 - skipped (9 entries)

SEQ ID NO: 12260 - DNA, 21 bp, Artificial Sequence
  Description of Artificial Sequence: Synthetic oligonucleotide
tgcgggagccagatgcacttc

SEQ ID NO: 12261-12269 - skipped (9 entries)

SEQ ID NO: 12270 - DNA, 21 bp, Artificial Sequence
  Description of Artificial Sequence: Synthetic oligonucleotide
aaccccgaggagtcggagctg

SEQ ID NO: 12271-12279 - skipped (9 entries)

SEQ ID NO: 12280 - DNA, 21 bp, Artificial Sequence
  Description of Artificial Sequence: Synthetic oligonucleotide
ttcaaccccgaggagtcggag

SEQ ID NO: 12281-12289 - skipped (9 entries)

SEQ ID NO: 12290 - DNA, 21 bp, Artificial Sequence
  Description of Artificial Sequence: Synthetic oligonucleotide
caccagcagtgcaagcgcaac

SEQ ID NO: 12291-12299 - skipped (9 entries)

SEQ ID NO: 12300 - DNA, 21 bp, Artificial Sequence
  Description of Artificial Sequence: Synthetic oligonucleotide
catgatgtggccggcgacatc

SEQ ID NO: 12301-12309 - skipped (9 entries)

SEQ ID NO: 12310 - DNA, 21 bp, Artificial Sequence
  Description of Artificial Sequence: Synthetic oligonucleotide
atcctgcgctgcggcaaggcc

SEQ ID NO: 12311-12319 - skipped (9 entries)

SEQ ID NO: 12320 - DNA, 21 bp, Artificial Sequence
  Description of Artificial Sequence: Synthetic oligonucleotide
cgccacgtaggggtgcccttc

SEQ ID NO: 12321-12329 - skipped (9 entries)

SEQ ID NO: 12330 - DNA, 21 bp, Artificial Sequence
  Description of Artificial Sequence: Synthetic oligonucleotide
ccgccacgtaggggtgccctt

SEQ ID NO: 12331-12339 - skipped (9 entries)

SEQ ID NO: 12340 - DNA, 21 bp, Artificial Sequence
  Description of Artificial Sequence: Synthetic oligonucleotide
atgaagataaattgatagcac

SEQ ID NO: 12341-12349 - skipped (9 entries)

SEQ ID NO: 12350 - DNA, 21 bp, Artificial Sequence
  Description of Artificial Sequence: Synthetic oligonucleotide
atagcacaaaatctagaactt

SEQ ID NO: 12351-12359 - skipped (9 entries)

SEQ ID NO: 12360 - DNA, 21 bp, Artificial Sequence
  Description of Artificial Sequence: Synthetic oligonucleotide
atgaaaccataaaaattggtt

SEQ ID NO: 12361-12369 - skipped (9 entries)

SEQ ID NO: 12370 - DNA, 21 bp, Artificial Sequence
  Description of Artificial Sequence: Synthetic oligonucleotide
gtttgactaagcttaattgct

SEQ ID NO: 12371-12379 - skipped (9 entries)

SEQ ID NO: 12380 - DNA, 21 bp, Artificial Sequence
  Description of Artificial Sequence: Synthetic oligonucleotide
gactaagcttaattgctttct

SEQ ID NO: 12381-12389 - skipped (9 entries)

SEQ ID NO: 12390 - DNA, 21 bp, Artificial Sequence
  Description of Artificial Sequence: Synthetic oligonucleotide
actaagcttaattgctttctg

SEQ ID NO: 12391-12399 - skipped (9 entries)

SEQ ID NO: 12400 - DNA, 21 bp, Artificial Sequence
  Description of Artificial Sequence: Synthetic oligonucleotide
attgctttctggaacaggatc

SEQ ID NO: 12401-12409 - skipped (9 entries)

SEQ ID NO: 12410 - DNA, 21 bp, Artificial Sequence
  Description of Artificial Sequence: Synthetic oligonucleotide
ctttctggaacaggatctgaa

SEQ ID NO: 12411-12419 - skipped (9 entries)

SEQ ID NO: 12420 - DNA, 21 bp, Artificial Sequence
  Description of Artificial Sequence: Synthetic oligonucleotide
ctggaacaggatctgaaactg

SEQ ID NO: 12421-12429 - skipped (9 entries)

SEQ ID NO: 12430 - DNA, 21 bp, Artificial Sequence
  Description of Artificial Sequence: Synthetic oligonucleotide
tggaacaggatctgaaactgg

SEQ ID NO: 12431-12439 - skipped (9 entries)

SEQ ID NO: 12440 - DNA, 21 bp, Artificial Sequence
  Description of Artificial Sequence: Synthetic oligonucleotide
tctaatgtccgttaaaggtac

SEQ ID NO: 12441-12449 - skipped (9 entries)

SEQ ID NO: 12450 - DNA, 21 bp, Artificial Sequence
  Description of Artificial Sequence: Synthetic oligonucleotide
aaggtacgacaccacagagga

SEQ ID NO: 12451-12459 - skipped (9 entries)

SEQ ID NO: 12460 - DNA, 21 bp, Artificial Sequence
  Description of Artificial Sequence: Synthetic oligonucleotide
tttatacccatcaacactggt

SEQ ID NO: 12461-12469 - skipped (9 entries)

SEQ ID NO: 12470 - DNA, 21 bp, Artificial Sequence
  Description of Artificial Sequence: Synthetic oligonucleotide
atacccatcaacactggtaag

SEQ ID NO: 12471-12479 - skipped (9 entries)

SEQ ID NO: 12480 - DNA, 21 bp, Artificial Sequence
  Description of Artificial Sequence: Synthetic oligonucleotide
tacccatcaacactggtaaga

SEQ ID NO: 12481-12489 - skipped (9 entries)

SEQ ID NO: 12490 - DNA, 21 bp, Artificial Sequence
  Description of Artificial Sequence: Synthetic oligonucleotide
atcagctgaaaaggaaacagc

SEQ ID NO: 12491-12499 - skipped (9 entries)

SEQ ID NO: 12500 - DNA, 21 bp, Artificial Sequence
  Description of Artificial Sequence: Synthetic oligonucleotide
atgatgctaaactgttcagaa

SEQ ID NO: 12501-12509 - skipped (9 entries)

SEQ ID NO: 12510 - DNA, 21 bp, Artificial Sequence
  Description of Artificial Sequence: Synthetic oligonucleotide
agaaaacaacaaagaagagac

SEQ ID NO: 12511-12519 - skipped (9 entries)

SEQ ID NO: 12520 - DNA, 21 bp, Artificial Sequence
  Description of Artificial Sequence: Synthetic oligonucleotide
cttcttttaggatgtggatgt

SEQ ID NO: 12521-12529 - skipped (9 entries)

SEQ ID NO: 12530 - DNA, 21 bp, Artificial Sequence
  Description of Artificial Sequence: Synthetic oligonucleotide
ttcttttaggatgtggatgta

SEQ ID NO: 12531-12539 - skipped (9 entries)

SEQ ID NO: 12540 - DNA, 21 bp, Artificial Sequence
  Description of Artificial Sequence: Synthetic oligonucleotide
ttttaggatgtggatgtagaa

SEQ ID NO: 12541-12549 - skipped (9 entries)

SEQ ID NO: 12550 - DNA, 21 bp, Artificial Sequence
  Description of Artificial Sequence: Synthetic oligonucleotide
taggatgtggatgtagaagag

SEQ ID NO: 12551-12559 - skipped (9 entries)

SEQ ID NO: 12560 - DNA, 21 bp, Artificial Sequence
  Description of Artificial Sequence: Synthetic oligonucleotide
aggatgtggatgtagaagagg

SEQ ID NO: 12561-12569 - skipped (9 entries)

SEQ ID NO: 12570 - DNA, 21 bp, Artificial Sequence
  Description of Artificial Sequence: Synthetic oligonucleotide
ggatgtggatgtagaagaggc

SEQ ID NO: 12571-12579 - skipped (9 entries)

SEQ ID NO: 12580 - DNA, 21 bp, Artificial Sequence
  Description of Artificial Sequence: Synthetic oligonucleotide
tggggcagtatactgaagaac

SEQ ID NO: 12581-12589 - skipped (9 entries)

SEQ ID NO: 12590 - DNA, 21 bp, Artificial Sequence
  Description of Artificial Sequence: Synthetic oligonucleotide
ttcatcaattggcggggttcc

SEQ ID NO: 12591-12599 - skipped (9 entries)

SEQ ID NO: 12600 - DNA, 21 bp, Artificial Sequence
  Description of Artificial Sequence: Synthetic oligonucleotide
atcaattggcggggttccatt

SEQ ID NO: 12601-12609 - skipped (9 entries)

SEQ ID NO: 12610 - DNA, 21 bp, Artificial Sequence
  Description of Artificial Sequence: Synthetic oligonucleotide
gcggggttccatttttccagg

SEQ ID NO: 12611-12619 - skipped (9 entries)

SEQ ID NO: 12620 - DNA, 21 bp, Artificial Sequence
  Description of Artificial Sequence: Synthetic oligonucleotide
tcccgccttaaatccacagca

SEQ ID NO: 12621-12629 - skipped (9 entries)

SEQ ID NO: 12630 - DNA, 21 bp, Artificial Sequence
  Description of Artificial Sequence: Synthetic oligonucleotide
cccgccttaaatccacagcat

SEQ ID NO: 12631-12639 - skipped (9 entries)

SEQ ID NO: 12640 - DNA, 21 bp, Artificial Sequence
  Description of Artificial Sequence: Synthetic oligonucleotide
ccgccttaaatccacagcata

SEQ ID NO: 12641-12649 - skipped (9 entries)

SEQ ID NO: 12650 - DNA, 21 bp, Artificial Sequence
  Description of Artificial Sequence: Synthetic oligonucleotide
aatccacagcataaaaaatca

SEQ ID NO: 12651-12659 - skipped (9 entries)

SEQ ID NO: 12660 - DNA, 21 bp, Artificial Sequence
  Description of Artificial Sequence: Synthetic oligonucleotide
acacactggagaggtctaaag

SEQ ID NO: 12661-12669 - skipped (9 entries)

SEQ ID NO: 12670 - DNA, 21 bp, Artificial Sequence
  Description of Artificial Sequence: Synthetic oligonucleotide
gttacaaagagcagattacct

SEQ ID NO: 12671-12679 - skipped (9 entries)

SEQ ID NO: 12680 - DNA, 21 bp, Artificial Sequence
  Description of Artificial Sequence: Synthetic oligonucleotide
caaagagcagattacctctgc

SEQ ID NO: 12681-12689 - skipped (9 entries)

SEQ ID NO: 12690 - DNA, 21 bp, Artificial Sequence
  Description of Artificial Sequence: Synthetic oligonucleotide
cctctgcgagcccagatcaac

SEQ ID NO: 12691-12699 - skipped (9 entries)

SEQ ID NO: 12700 - DNA, 21 bp, Artificial Sequence
  Description of Artificial Sequence: Synthetic oligonucleotide
tagattttgtgctatcaattt

SEQ ID NO: 12701-12709 - skipped (9 entries)

SEQ ID NO: 12710 - DNA, 21 bp, Artificial Sequence
  Description of Artificial Sequence: Synthetic oligonucleotide
agttctagattttgtgctatc

SEQ ID NO: 12711-12719 - skipped (9 entries)

SEQ ID NO: 12720 - DNA, 21 bp, Artificial Sequence
  Description of Artificial Sequence: Synthetic oligonucleotide
attaagttctagattttgtgc

SEQ ID NO: 12721-12729 - skipped (9 entries)

SEQ ID NO: 12730 - DNA, 21 bp, Artificial Sequence
  Description of Artificial Sequence: Synthetic oligonucleotide
cattaagttctagattttgtg

SEQ ID NO: 12731-12739 - skipped (9 entries)

SEQ ID NO: 12740 - DNA, 21 bp, Artificial Sequence
  Description of Artificial Sequence: Synthetic oligonucleotide
tggtttcattaagttctagat

SEQ ID NO: 12741-12749 - skipped (9 entries)

SEQ ID NO: 12750 - DNA, 21 bp, Artificial Sequence
  Description of Artificial Sequence: Synthetic oligonucleotide
atggtttcattaagttctaga

SEQ ID NO: 12751-12759 - skipped (9 entries)

SEQ ID NO: 12760 - DNA, 21 bp, Artificial Sequence
  Description of Artificial Sequence: Synthetic oligonucleotide
tatggtttcattaagttctag

SEQ ID NO: 12761-12769 - skipped (9 entries)

SEQ ID NO: 12770 - DNA, 21 bp, Artificial Sequence
  Description of Artificial Sequence: Synthetic oligonucleotide
ttatggtttcattaagttcta

SEQ ID NO: 12771-12779 - skipped (9 entries)

SEQ ID NO: 12780 - DNA, 21 bp, Artificial Sequence
  Description of Artificial Sequence: Synthetic oligonucleotide
gtcaaaccaatttttatggtt

SEQ ID NO: 12781-12789 - skipped (9 entries)

SEQ ID NO: 12790 - DNA, 21 bp, Artificial Sequence
  Description of Artificial Sequence: Synthetic oligonucleotide
agcttagtcaaaccaattttt

SEQ ID NO: 12791-12799 - skipped (9 entries)

SEQ ID NO: 12800 - DNA, 21 bp, Artificial Sequence
  Description of Artificial Sequence: Synthetic oligonucleotide
cagaaagcaattaagcttagt

SEQ ID NO: 12801-12809 - skipped (9 entries)

SEQ ID NO: 12810 - DNA, 21 bp, Artificial Sequence
  Description of Artificial Sequence: Synthetic oligonucleotide
agatcctgttccagaaagcaa

SEQ ID NO: 12811-12819 - skipped (9 entries)

SEQ ID NO: 12820 - DNA, 21 bp, Artificial Sequence
  Description of Artificial Sequence: Synthetic oligonucleotide
cagatcctgttccagaaagca

SEQ ID NO: 12821-12829 - skipped (9 entries)

SEQ ID NO: 12830 - DNA, 21 bp, Artificial Sequence
  Description of Artificial Sequence: Synthetic oligonucleotide
ggatatccagtttcagatcct

SEQ ID NO: 12831-12839 - skipped (9 entries)

SEQ ID NO: 12840 - DNA, 21 bp, Artificial Sequence
  Description of Artificial Sequence: Synthetic oligonucleotide
aagtacctgttgggatatcca

SEQ ID NO: 12841-12849 - skipped (9 entries)

SEQ ID NO: 12850 - DNA, 21 bp, Artificial Sequence
  Description of Artificial Sequence: Synthetic oligonucleotide
aaagtacctgttgggatatcc

SEQ ID NO: 12851-12859 - skipped (9 entries)

SEQ ID NO: 12860 - DNA, 21 bp, Artificial Sequence
  Description of Artificial Sequence: Synthetic oligonucleotide
taaagtacctgttgggatatc

SEQ ID NO: 12861-12869 - skipped (9 entries)

SEQ ID NO: 12870 - DNA, 21 bp, Artificial Sequence
  Description of Artificial Sequence: Synthetic oligonucleotide
tcttttaaagtacctgttggg

SEQ ID NO: 12871-12879 - skipped (9 entries)

SEQ ID NO: 12880 - DNA, 21 bp, Artificial Sequence
  Description of Artificial Sequence: Synthetic oligonucleotide
ctcttttaaagtacctgttgg

SEQ ID NO: 12881-12889 - skipped (9 entries)

SEQ ID NO: 12890 - DNA, 21 bp, Artificial Sequence
  Description of Artificial Sequence: Synthetic oligonucleotide
tatttctcttttaaagtacct

SEQ ID NO: 12891-12899 - skipped (9 entries)

SEQ ID NO: 12900 - DNA, 21 bp, Artificial Sequence
  Description of Artificial Sequence: Synthetic oligonucleotide
ctctgtggtgtcgtaccttta

SEQ ID NO: 12901-12909 - skipped (9 entries)

SEQ ID NO: 12910 - DNA, 21 bp, Artificial Sequence
  Description of Artificial Sequence: Synthetic oligonucleotide
cctctgtggtgtcgtaccttt

SEQ ID NO: 12911-12919 - skipped (9 entries)

SEQ ID NO: 12920 - DNA, 21 bp, Artificial Sequence
  Description of Artificial Sequence: Synthetic oligonucleotide
tcctctgtggtgtcgtacctt

SEQ ID NO: 12921-12929 - skipped (9 entries)

SEQ ID NO: 12930 - DNA, 21 bp, Artificial Sequence
  Description of Artificial Sequence: Synthetic oligonucleotide
atgggtataaataacttttcc

SEQ ID NO: 12931-12939 - skipped (9 entries)

SEQ ID NO: 12940 - DNA, 21 bp, Artificial Sequence
  Description of Artificial Sequence: Synthetic oligonucleotide
ccagtgttgatgggtataaat

SEQ ID NO: 12941-12949 - skipped (9 entries)

SEQ ID NO: 12950 - DNA, 21 bp, Artificial Sequence
  Description of Artificial Sequence: Synthetic oligonucleotide
ttaccagtgttgatgggtata

SEQ ID NO: 12951-12959 - skipped (9 entries)

SEQ ID NO: 12960 - DNA, 21 bp, Artificial Sequence
  Description of Artificial Sequence: Synthetic oligonucleotide
agttcttaccagtgttgatgg

SEQ ID NO: 12961-12969 - skipped (9 entries)

SEQ ID NO: 12970 - DNA, 21 bp, Artificial Sequence
  Description of Artificial Sequence: Synthetic oligonucleotide
acgtggttcagttcttaccag

SEQ ID NO: 12971-12979 - skipped (9 entries)

SEQ ID NO: 12980 - DNA, 21 bp, Artificial Sequence
  Description of Artificial Sequence: Synthetic oligonucleotide
agctgatcaaggagatgttca

SEQ ID NO: 12981-12989 - skipped (9 entries)

SEQ ID NO: 12990 - DNA, 21 bp, Artificial Sequence
  Description of Artificial Sequence: Synthetic oligonucleotide
cagctgatcaaggagatgttc

SEQ ID NO: 12991-12999 - skipped (9 entries)

SEQ ID NO: 13000 - DNA, 21 bp, Artificial Sequence
  Description of Artificial Sequence: Synthetic oligonucleotide
tcagctgatcaaggagatgtt

SEQ ID NO: 13001-13009 - skipped (9 entries)

SEQ ID NO: 13010 - DNA, 21 bp, Artificial Sequence
  Description of Artificial Sequence: Synthetic oligonucleotide
cttttcagctgatcaaggaga

SEQ ID NO: 13011-13019 - skipped (9 entries)

SEQ ID NO: 13020 - DNA, 21 bp, Artificial Sequence
  Description of Artificial Sequence: Synthetic oligonucleotide
ccttttcagctgatcaaggag

SEQ ID NO: 13021-13029 - skipped (9 entries)

SEQ ID NO: 13030 - DNA, 21 bp, Artificial Sequence
  Description of Artificial Sequence: Synthetic oligonucleotide
acagctcaggctgtttccttt

SEQ ID NO: 13031-13039 - skipped (9 entries)

SEQ ID NO: 13040 - DNA, 21 bp, Artificial Sequence
  Description of Artificial Sequence: Synthetic oligonucleotide
gcatcattaacagctcaggct

SEQ ID NO: 13041-13049 - skipped (9 entries)

SEQ ID NO: 13050 - DNA, 21 bp, Artificial Sequence
  Description of Artificial Sequence: Synthetic oligonucleotide
agcatcattaacagctcaggc

SEQ ID NO: 13051-13059 - skipped (9 entries)

SEQ ID NO: 13060 - DNA, 21 bp, Artificial Sequence
  Description of Artificial Sequence: Synthetic oligonucleotide
tgaacagtttagcatcattaa

SEQ ID NO: 13061-13069 - skipped (9 entries)

SEQ ID NO: 13070 - DNA, 21 bp, Artificial Sequence
  Description of Artificial Sequence: Synthetic oligonucleotide
ctgaacagtttagcatcatta

SEQ ID NO: 13071-13079 - skipped (9 entries)

SEQ ID NO: 13080 - DNA, 21 bp, Artificial Sequence
  Description of Artificial Sequence: Synthetic oligonucleotide
tctgaacagtttagcatcatt

SEQ ID NO: 13081-13089 - skipped (9 entries)

SEQ ID NO: 13090 - DNA, 21 bp, Artificial Sequence
  Description of Artificial Sequence: Synthetic oligonucleotide
ttttctgaacagtttagcatc

SEQ ID NO: 13091-13099 - skipped (9 entries)

SEQ ID NO: 13100 - DNA, 21 bp, Artificial Sequence
  Description of Artificial Sequence: Synthetic oligonucleotide
ttgttttctgaacagtttagc

SEQ ID NO: 13101-13109 - skipped (9 entries)

SEQ ID NO: 13110 - DNA, 21 bp, Artificial Sequence
  Description of Artificial Sequence: Synthetic oligonucleotide
tttgttgttttctgaacagtt

SEQ ID NO: 13111-13119 - skipped (9 entries)

SEQ ID NO: 13120 - DNA, 21 bp, Artificial Sequence
  Description of Artificial Sequence: Synthetic oligonucleotide
tctcttctttgttgttttctg

SEQ ID NO: 13121-13129 - skipped (9 entries)

SEQ ID NO: 13130 - DNA, 21 bp, Artificial Sequence
  Description of Artificial Sequence: Synthetic oligonucleotide
ccggaattgtctcttctttgt

SEQ ID NO: 13131-13139 - skipped (9 entries)

SEQ ID NO: 13140 - DNA, 21 bp, Artificial Sequence
  Description of Artificial Sequence: Synthetic oligonucleotide
accggaattgtctcttctttg

SEQ ID NO: 13141-13149 - skipped (9 entries)

SEQ ID NO: 13150 - DNA, 21 bp, Artificial Sequence
  Description of Artificial Sequence: Synthetic oligonucleotide
aatttaccggaattgtctctt

SEQ ID NO: 13151-13159 - skipped (9 entries)

SEQ ID NO: 13160 - DNA, 21 bp, Artificial Sequence
  Description of Artificial Sequence: Synthetic oligonucleotide
aaatttaccggaattgtctct

SEQ ID NO: 13161-13169 - skipped (9 entries)

SEQ ID NO: 13170 - DNA, 21 bp, Artificial Sequence
  Description of Artificial Sequence: Synthetic oligonucleotide
agtatactgccccagaactgc

SEQ ID NO: 13171-13179 - skipped (9 entries)

SEQ ID NO: 13180 - DNA, 21 bp, Artificial Sequence
  Description of Artificial Sequence: Synthetic oligonucleotide
ttcagtatactgccccagaac

SEQ ID NO: 13181-13189 - skipped (9 entries)

SEQ ID NO: 13190 - DNA, 21 bp, Artificial Sequence
  Description of Artificial Sequence: Synthetic oligonucleotide
gaggttcttcagtatactgcc

SEQ ID NO: 13191-13199 - skipped (9 entries)

SEQ ID NO: 13200 - DNA, 21 bp, Artificial Sequence
  Description of Artificial Sequence: Synthetic oligonucleotide
acttagaggttcttcagtata

SEQ ID NO: 13201-13209 - skipped (9 entries)

SEQ ID NO: 13210 - DNA, 21 bp, Artificial Sequence
  Description of Artificial Sequence: Synthetic oligonucleotide
atgaacaatccacaccagcat

SEQ ID NO: 13211-13219 - skipped (9 entries)

SEQ ID NO: 13220 - DNA, 21 bp, Artificial Sequence
  Description of Artificial Sequence: Synthetic oligonucleotide
tctgatatgacatacctggaa

SEQ ID NO: 13221-13229 - skipped (9 entries)

SEQ ID NO: 13230 - DNA, 21 bp, Artificial Sequence
  Description of Artificial Sequence: Synthetic oligonucleotide
catgtgattttttatgctgtg

SEQ ID NO: 13231-13239 - skipped (9 entries)

SEQ ID NO: 13240 - DNA, 21 bp, Artificial Sequence
  Description of Artificial Sequence: Synthetic oligonucleotide
ccatgtgattttttatgctgt

SEQ ID NO: 13241-13249 - skipped (9 entries)

SEQ ID NO: 13250 - DNA, 21 bp, Artificial Sequence
  Description of Artificial Sequence: Synthetic oligonucleotide
tccatgtgattttttatgctg

SEQ ID NO: 13251-13259 - skipped (9 entries)

SEQ ID NO: 13260 - DNA, 21 bp, Artificial Sequence
  Description of Artificial Sequence: Synthetic oligonucleotide
tcttttccatgtgatttttta

SEQ ID NO: 13261-13269 - skipped (9 entries)

SEQ ID NO: 13270 - DNA, 21 bp, Artificial Sequence
  Description of Artificial Sequence: Synthetic oligonucleotide
gtcttttccatgtgatttttt

SEQ ID NO: 13271-13279 - skipped (9 entries)

SEQ ID NO: 13280 - DNA, 21 bp, Artificial Sequence
  Description of Artificial Sequence: Synthetic oligonucleotide
tttgtcttttccatgtgattt

SEQ ID NO: 13281-13289 - skipped (9 entries)

SEQ ID NO: 13290 - DNA, 21 bp, Artificial Sequence
  Description of Artificial Sequence: Synthetic oligonucleotide
ctttgtcttttccatgtgatt

SEQ ID NO: 13291-13299 - skipped (9 entries)

SEQ ID NO: 13300 - DNA, 21 bp, Artificial Sequence
  Description of Artificial Sequence: Synthetic oligonucleotide
tctttgtcttttccatgtgat

SEQ ID NO: 13301-13309 - skipped (9 entries)

SEQ ID NO: 13310 - DNA, 21 bp, Artificial Sequence
  Description of Artificial Sequence: Synthetic oligonucleotide
atgcctctgttttctttgtct

SEQ ID NO: 13311-13319 - skipped (9 entries)

SEQ ID NO: 13320 - DNA, 21 bp, Artificial Sequence
  Description of Artificial Sequence: Synthetic oligonucleotide
gacctctccagtgtgttaatg

SEQ ID NO: 13321-13329 - skipped (9 entries)

SEQ ID NO: 13330 - DNA, 21 bp, Artificial Sequence
  Description of Artificial Sequence: Synthetic oligonucleotide
agacctctccagtgtgttaat

SEQ ID NO: 13331-13339 - skipped (9 entries)

SEQ ID NO: 13340 - DNA, 21 bp, Artificial Sequence
  Description of Artificial Sequence: Synthetic oligonucleotide
cactttagacctctccagtgt

SEQ ID NO: 13341-13349 - skipped (9 entries)

SEQ ID NO: 13350 - DNA, 21 bp, Artificial Sequence
  Description of Artificial Sequence: Synthetic oligonucleotide
ttccactttagacctctccag

SEQ ID NO: 13351-13359 - skipped (9 entries)

SEQ ID NO: 13360 - DNA, 21 bp, Artificial Sequence
  Description of Artificial Sequence: Synthetic oligonucleotide
cttccactttagacctctcca

SEQ ID NO: 13361-13369 - skipped (9 entries)

SEQ ID NO: 13370 - DNA, 21 bp, Artificial Sequence
  Description of Artificial Sequence: Synthetic oligonucleotide
taaccaagtgctctgtagttt

SEQ ID NO: 13371-13379 - skipped (9 entries)

SEQ ID NO: 13380 - DNA, 21 bp, Artificial Sequence
  Description of Artificial Sequence: Synthetic oligonucleotide
gtaaccaagtgctctgtagtt

SEQ ID NO: 13381-13389 - skipped (9 entries)

SEQ ID NO: 13390 - DNA, 21 bp, Artificial Sequence
  Description of Artificial Sequence: Synthetic oligonucleotide
atctgggctcgcagaggtaat

SEQ ID NO: 13391-13399 - skipped (9 entries)

SEQ ID NO: 13400 - DNA, 21 bp, Artificial Sequence
  Description of Artificial Sequence: Synthetic oligonucleotide
aaggttgatctgggctcgcag

SEQ ID NO: 13401-13409 - skipped (9 entries)

SEQ ID NO: 13410 - DNA, 21 bp, Artificial Sequence
  Description of Artificial Sequence: Synthetic oligonucleotide
ccaacccccaagtgaattaaa

SEQ ID NO: 13411-13419 - skipped (9 entries)

SEQ ID NO: 13420 - DNA, 21 bp, Artificial Sequence
  Description of Artificial Sequence: Synthetic oligonucleotide
tgcagaccacagtccatgcca

SEQ ID NO: 13421-13429 - skipped (9 entries)

SEQ ID NO: 13430 - DNA, 21 bp, Artificial Sequence
  Description of Artificial Sequence: Synthetic oligonucleotide
gcagaccacagtccatgccat

SEQ ID NO: 13431-13439 - skipped (9 entries)

SEQ ID NO: 13440 - DNA, 21 bp, Artificial Sequence
  Description of Artificial Sequence: Synthetic oligonucleotide
cagaccacagtccatgccatc

SEQ ID NO: 13441-13449 - skipped (9 entries)

SEQ ID NO: 13450 - DNA, 21 bp, Artificial Sequence
  Description of Artificial Sequence: Synthetic oligonucleotide
tcatcttctaggtatgacaac

SEQ ID NO: 13451-13459 - skipped (9 entries)

SEQ ID NO: 13460 - DNA, 21 bp, Artificial Sequence
  Description of Artificial Sequence: Synthetic oligonucleotide
catcttctaggtatgacaacg

SEQ ID NO: 13461-13469 - skipped (9 entries)

SEQ ID NO: 13470 - DNA, 21 bp, Artificial Sequence
  Description of Artificial Sequence: Synthetic oligonucleotide
atcttctaggtatgacaacga

SEQ ID NO: 13471-13479 - skipped (9 entries)

SEQ ID NO: 13480 - DNA, 21 bp, Artificial Sequence
  Description of Artificial Sequence: Synthetic oligonucleotide
taggtatgacaacgaatttgg

SEQ ID NO: 13481-13489 - skipped (9 entries)

SEQ ID NO: 13490 - DNA, 21 bp, Artificial Sequence
  Description of Artificial Sequence: Synthetic oligonucleotide
cccagctctcataccatgagt

SEQ ID NO: 13491-13499 - skipped (9 entries)

SEQ ID NO: 13500 - DNA, 21 bp, Artificial Sequence
  Description of Artificial Sequence: Synthetic oligonucleotide
tatccacagtgaatcttggtt

SEQ ID NO: 13501-13509 - skipped (9 entries)

SEQ ID NO: 13510 - DNA, 21 bp, Artificial Sequence
  Description of Artificial Sequence: Synthetic oligonucleotide
gttgtaaacttgacctaaaga

SEQ ID NO: 13511-13519 - skipped (9 entries)

SEQ ID NO: 13520 - DNA, 21 bp, Artificial Sequence
  Description of Artificial Sequence: Synthetic oligonucleotide
taaacttgacctaaagaccat

SEQ ID NO: 13521-13529 - skipped (9 entries)

SEQ ID NO: 13530 - DNA, 21 bp, Artificial Sequence
  Description of Artificial Sequence: Synthetic oligonucleotide
acctaaagaccattgcacttc

SEQ ID NO: 13531-13539 - skipped (9 entries)

SEQ ID NO: 13540 - DNA, 21 bp, Artificial Sequence
  Description of Artificial Sequence: Synthetic oligonucleotide
cacttcgtgcccgaaacgccg

SEQ ID NO: 13541-13549 - skipped (9 entries)

SEQ ID NO: 13550 - DNA, 21 bp, Artificial Sequence
  Description of Artificial Sequence: Synthetic oligonucleotide
gtgcccgaaacgccgaatata

SEQ ID NO: 13551-13559 - skipped (9 entries)

SEQ ID NO: 13560 - DNA, 21 bp, Artificial Sequence
  Description of Artificial Sequence: Synthetic oligonucleotide
tctctgaccattgtagcggtt

SEQ ID NO: 13561-13569 - skipped (9 entries)

SEQ ID NO: 13570 - DNA, 21 bp, Artificial Sequence
  Description of Artificial Sequence: Synthetic oligonucleotide
tagcggtttgctgcggtaatc

SEQ ID NO: 13571-13579 - skipped (9 entries)

SEQ ID NO: 13580 - DNA, 21 bp, Artificial Sequence
  Description of Artificial Sequence: Synthetic oligonucleotide
gctgcggtaatcatgaggata

SEQ ID NO: 13581-13589 - skipped (9 entries)

SEQ ID NO: 13590 - DNA, 21 bp, Artificial Sequence
  Description of Artificial Sequence: Synthetic oligonucleotide
ctgcggtaatcatgaggataa

SEQ ID NO: 13591-13599 - skipped (9 entries)

SEQ ID NO: 13600 - DNA, 21 bp, Artificial Sequence
  Description of Artificial Sequence: Synthetic oligonucleotide
tcagttctgggaaaatggtgt

SEQ ID NO: 13601-13609 - skipped (9 entries)

SEQ ID NO: 13610 - DNA, 21 bp, Artificial Sequence
  Description of Artificial Sequence: Synthetic oligonucleotide
cagttctgggaaaatggtgtg

SEQ ID NO: 13611-13619 - skipped (9 entries)

SEQ ID NO: 13620 - DNA, 21 bp, Artificial Sequence
  Description of Artificial Sequence: Synthetic oligonucleotide
agttctgggaaaatggtgtgc

SEQ ID NO: 13621-13629 - skipped (9 entries)

SEQ ID NO: 13630 - DNA, 21 bp, Artificial Sequence
  Description of Artificial Sequence: Synthetic oligonucleotide
tgggaaaatggtgtgcacagg

SEQ ID NO: 13631-13639 - skipped (9 entries)

SEQ ID NO: 13640 - DNA, 21 bp, Artificial Sequence
  Description of Artificial Sequence: Synthetic oligonucleotide
tttcctttccctagtgaagaa

SEQ ID NO: 13641-13649 - skipped (9 entries)

SEQ ID NO: 13650 - DNA, 21 bp, Artificial Sequence
  Description of Artificial Sequence: Synthetic oligonucleotide
ttcctttccctagtgaagaac

SEQ ID NO: 13651-13659 - skipped (9 entries)

SEQ ID NO: 13660 - DNA, 21 bp, Artificial Sequence
  Description of Artificial Sequence: Synthetic oligonucleotide
tcctttccctagtgaagaaca

SEQ ID NO: 13661-13669 - skipped (9 entries)

SEQ ID NO: 13670 - DNA, 21 bp, Artificial Sequence
  Description of Artificial Sequence: Synthetic oligonucleotide
cctttccctagtgaagaacag

SEQ ID NO: 13671-13679 - skipped (9 entries)

SEQ ID NO: 13680 - DNA, 21 bp, Artificial Sequence
  Description of Artificial Sequence: Synthetic oligonucleotide
ctttccctagtgaagaacagt

SEQ ID NO: 13681-13689 - skipped (9 entries)

SEQ ID NO: 13690 - DNA, 21 bp, Artificial Sequence
  Description of Artificial Sequence: Synthetic oligonucleotide
ccctagtgaagaacagtccag

SEQ ID NO: 13691-13699 - skipped (9 entries)

SEQ ID NO: 13700 - DNA, 21 bp, Artificial Sequence
  Description of Artificial Sequence: Synthetic oligonucleotide
cctagtgaagaacagtccaga

SEQ ID NO: 13701-13709 - skipped (9 entries)

SEQ ID NO: 13710 - DNA, 21 bp, Artificial Sequence
  Description of Artificial Sequence: Synthetic oligonucleotide
tacagaagttgggttttccag

SEQ ID NO: 13711-13719 - skipped (9 entries)

SEQ ID NO: 13720 - DNA, 21 bp, Artificial Sequence
  Description of Artificial Sequence: Synthetic oligonucleotide
ggttttccagctaagttcttg

SEQ ID NO: 13721-13729 - skipped (9 entries)

SEQ ID NO: 13730 - DNA, 21 bp, Artificial Sequence
  Description of Artificial Sequence: Synthetic oligonucleotide
tccagctaagttcttggactt

SEQ ID NO: 13731-13739 - skipped (9 entries)

SEQ ID NO: 13740 - DNA, 21 bp, Artificial Sequence
  Description of Artificial Sequence: Synthetic oligonucleotide
ccagctaagttcttggacttc

SEQ ID NO: 13741-13749 - skipped (9 entries)

SEQ ID NO: 13750 - DNA, 21 bp, Artificial Sequence
  Description of Artificial Sequence: Synthetic oligonucleotide
cagctaagttcttggacttca

SEQ ID NO: 13751-13759 - skipped (9 entries)

SEQ ID NO: 13760 - DNA, 21 bp, Artificial Sequence
  Description of Artificial Sequence: Synthetic oligonucleotide
ttggacttcaagattcagaat

SEQ ID NO: 13761-13769 - skipped (9 entries)

SEQ ID NO: 13770 - DNA, 21 bp, Artificial Sequence
  Description of Artificial Sequence: Synthetic oligonucleotide
gacttcaagattcagaatatg

SEQ ID NO: 13771-13779 - skipped (9 entries)

SEQ ID NO: 13780 - DNA, 21 bp, Artificial Sequence
  Description of Artificial Sequence: Synthetic oligonucleotide
aagattcagaatatggtgggg

SEQ ID NO: 13781-13789 - skipped (9 entries)

SEQ ID NO: 13790 - DNA, 21 bp, Artificial Sequence
  Description of Artificial Sequence: Synthetic oligonucleotide
agaatatggtggggagctgtg

SEQ ID NO: 13791-13799 - skipped (9 entries)

SEQ ID NO: 13800 - DNA, 21 bp, Artificial Sequence
  Description of Artificial Sequence: Synthetic oligonucleotide
cctataaggttagaaggcctt

SEQ ID NO: 13801-13809 - skipped (9 entries)

SEQ ID NO: 13810 - DNA, 21 bp, Artificial Sequence
  Description of Artificial Sequence: Synthetic oligonucleotide
ctataaggttagaaggccttg

SEQ ID NO: 13811-13819 - skipped (9 entries)

SEQ ID NO: 13820 - DNA, 21 bp, Artificial Sequence
  Description of Artificial Sequence: Synthetic oligonucleotide
tgctcacccaccaacaattta

SEQ ID NO: 13821-13829 - skipped (9 entries)

SEQ ID NO: 13830 - DNA, 21 bp, Artificial Sequence
  Description of Artificial Sequence: Synthetic oligonucleotide
ttgcaattttccttctagtta

SEQ ID NO: 13831-13839 - skipped (9 entries)

SEQ ID NO: 13840 - DNA, 21 bp, Artificial Sequence
  Description of Artificial Sequence: Synthetic oligonucleotide
tgcaattttccttctagttat

SEQ ID NO: 13841-13849 - skipped (9 entries)

SEQ ID NO: 13850 - DNA, 21 bp, Artificial Sequence
  Description of Artificial Sequence: Synthetic oligonucleotide
gcaattttccttctagttatg

SEQ ID NO: 13851-13859 - skipped (9 entries)

SEQ ID NO: 13860 - DNA, 21 bp, Artificial Sequence
  Description of Artificial Sequence: Synthetic oligonucleotide
caattttccttctagttatga

SEQ ID NO: 13861-13869 - skipped (9 entries)

SEQ ID NO: 13870 - DNA, 21 bp, Artificial Sequence
  Description of Artificial Sequence: Synthetic oligonucleotide
tccttctagttatgagccaga

SEQ ID NO: 13871-13879 - skipped (9 entries)

SEQ ID NO: 13880 - DNA, 21 bp, Artificial Sequence
  Description of Artificial Sequence: Synthetic oligonucleotide
ccttctagttatgagccagag

SEQ ID NO: 13881-13889 - skipped (9 entries)

SEQ ID NO: 13890 - DNA, 21 bp, Artificial Sequence
  Description of Artificial Sequence: Synthetic oligonucleotide
cttctagttatgagccagagt

SEQ ID NO: 13891-13899 - skipped (9 entries)

SEQ ID NO: 13900 - DNA, 21 bp, Artificial Sequence
  Description of Artificial Sequence: Synthetic oligonucleotide
tagttatgagccagagttatt

SEQ ID NO: 13901-13909 - skipped (9 entries)

SEQ ID NO: 13910 - DNA, 21 bp, Artificial Sequence
  Description of Artificial Sequence: Synthetic oligonucleotide
tgagccagagttatttcctgg

SEQ ID NO: 13911-13919 - skipped (9 entries)

SEQ ID NO: 13920 - DNA, 21 bp, Artificial Sequence
  Description of Artificial Sequence: Synthetic oligonucleotide
cctggtttaatctacagaatg

SEQ ID NO: 13921-13929 - skipped (9 entries)

SEQ ID NO: 13930 - DNA, 21 bp, Artificial Sequence
  Description of Artificial Sequence: Synthetic oligonucleotide
ctggtttaatctacagaatga

SEQ ID NO: 13931-13939 - skipped (9 entries)

SEQ ID NO: 13940 - DNA, 21 bp, Artificial Sequence
  Description of Artificial Sequence: Synthetic oligonucleotide
aatctacagaatgatcaaacc

SEQ ID NO: 13941-13949 - skipped (9 entries)

SEQ ID NO: 13950 - DNA, 21 bp, Artificial Sequence
  Description of Artificial Sequence: Synthetic oligonucleotide
atctacagaatgatcaaaccc

SEQ ID NO: 13951-13959 - skipped (9 entries)

SEQ ID NO: 13960 - DNA, 21 bp, Artificial Sequence
  Description of Artificial Sequence: Synthetic oligonucleotide
ttctccttatttttgtttctg

SEQ ID NO: 13961-13969 - skipped (9 entries)

SEQ ID NO: 13970 - DNA, 21 bp, Artificial Sequence
  Description of Artificial Sequence: Synthetic oligonucleotide
tccttatttttgtttctggaa

SEQ ID NO: 13971-13979 - skipped (9 entries)

SEQ ID NO: 13980 - DNA, 21 bp, Artificial Sequence
  Description of Artificial Sequence: Synthetic oligonucleotide
tttttgtttctggaaaagttg

SEQ ID NO: 13981-13989 - skipped (9 entries)

SEQ ID NO: 13990 - DNA, 21 bp, Artificial Sequence
  Description of Artificial Sequence: Synthetic oligonucleotide
ttgtttctggaaaagttgtat

SEQ ID NO: 13991-13999 - skipped (9 entries)

SEQ ID NO: 14000 - DNA, 21 bp, Artificial Sequence
  Description of Artificial Sequence: Synthetic oligonucleotide
tgtttctggaaaagttgtatt

SEQ ID NO: 14001-14009 - skipped (9 entries)

SEQ ID NO: 14010 - DNA, 21 bp, Artificial Sequence
  Description of Artificial Sequence: Synthetic oligonucleotide
gtttctggaaaagttgtatta

SEQ ID NO: 14011-14019 - skipped (9 entries)

SEQ ID NO: 14020 - DNA, 21 bp, Artificial Sequence
  Description of Artificial Sequence: Synthetic oligonucleotide
tttctggaaaagttgtattaa

SEQ ID NO: 14021-14029 - skipped (9 entries)

SEQ ID NO: 14030 - DNA, 21 bp, Artificial Sequence
  Description of Artificial Sequence: Synthetic oligonucleotide
ctggaaaagttgtattaacag

SEQ ID NO: 14031-14039 - skipped (9 entries)

SEQ ID NO: 14040 - DNA, 21 bp, Artificial Sequence
  Description of Artificial Sequence: Synthetic oligonucleotide
tggaaaagttgtattaacagg

SEQ ID NO: 14041-14049 - skipped (9 entries)

SEQ ID NO: 14050 - DNA, 21 bp, Artificial Sequence
  Description of Artificial Sequence: Synthetic oligonucleotide
tcttcttaggtgctaaagtca

SEQ ID NO: 14051-14059 - skipped (9 entries)

SEQ ID NO: 14060 - DNA, 21 bp, Artificial Sequence
  Description of Artificial Sequence: Synthetic oligonucleotide
ttaggtgctaaagtcagagca

SEQ ID NO: 14061-14069 - skipped (9 entries)

SEQ ID NO: 14070 - DNA, 21 bp, Artificial Sequence
  Description of Artificial Sequence: Synthetic oligonucleotide
ggtgctaaagtcagagcagaa

SEQ ID NO: 14071-14079 - skipped (9 entries)

SEQ ID NO: 14080 - DNA, 21 bp, Artificial Sequence
  Description of Artificial Sequence: Synthetic oligonucleotide
taaagggattcaggaagacga

SEQ ID NO: 14081-14089 - skipped (9 entries)

SEQ ID NO: 14090 - DNA, 21 bp, Artificial Sequence
  Description of Artificial Sequence: Synthetic oligonucleotide
ggtcaagtttacaaccaagat

SEQ ID NO: 14091-14099 - skipped (9 entries)

SEQ ID NO: 14100 - DNA, 21 bp, Artificial Sequence
  Description of Artificial Sequence: Synthetic oligonucleotide
aggtcaagtttacaaccaaga

SEQ ID NO: 14101-14109 - skipped (9 entries)

SEQ ID NO: 14110 - DNA, 21 bp, Artificial Sequence
  Description of Artificial Sequence: Synthetic oligonucleotide
gggcacgaagtgcaatggtct

SEQ ID NO: 14111-14119 - skipped (9 entries)

SEQ ID NO: 14120 - DNA, 21 bp, Artificial Sequence
  Description of Artificial Sequence: Synthetic oligonucleotide
cgggcacgaagtgcaatggtc

SEQ ID NO: 14121-14129 - skipped (9 entries)

SEQ ID NO: 14130 - DNA, 21 bp, Artificial Sequence
  Description of Artificial Sequence: Synthetic oligonucleotide
ggcgtttcgggcacgaagtgc

SEQ ID NO: 14131-14139 - skipped (9 entries)

SEQ ID NO: 14140 - DNA, 21 bp, Artificial Sequence
  Description of Artificial Sequence: Synthetic oligonucleotide
tattcggcgtttcgggcacga

SEQ ID NO: 14141-14149 - skipped (9 entries)

SEQ ID NO: 14150 - DNA, 21 bp, Artificial Sequence
  Description of Artificial Sequence: Synthetic oligonucleotide
ggattatattcggcgtttcgg

SEQ ID NO: 14151-14159 - skipped (9 entries)

SEQ ID NO: 14160 - DNA, 21 bp, Artificial Sequence
  Description of Artificial Sequence: Synthetic oligonucleotide
aaatagatctaaccttgggat

SEQ ID NO: 14161-14169 - skipped (9 entries)

SEQ ID NO: 14170 - DNA, 21 bp, Artificial Sequence
  Description of Artificial Sequence: Synthetic oligonucleotide
tcctcatgattaccgcagcaa

SEQ ID NO: 14171-14179 - skipped (9 entries)

SEQ ID NO: 14180 - DNA, 21 bp, Artificial Sequence
  Description of Artificial Sequence: Synthetic oligonucleotide
gtggctctcttatcctcatga

SEQ ID NO: 14181-14189 - skipped (9 entries)

SEQ ID NO: 14190 - DNA, 21 bp, Artificial Sequence
  Description of Artificial Sequence: Synthetic oligonucleotide
ccagaactgaaaatcagtgcc

SEQ ID NO: 14191-14199 - skipped (9 entries)

SEQ ID NO: 14200 - DNA, 21 bp, Artificial Sequence
  Description of Artificial Sequence: Synthetic oligonucleotide
cccagaactgaaaatcagtgc

SEQ ID NO: 14201-14209 - skipped (9 entries)

SEQ ID NO: 14210 - DNA, 21 bp, Artificial Sequence
  Description of Artificial Sequence: Synthetic oligonucleotide
tcccagaactgaaaatcagtg

SEQ ID NO: 14211-14219 - skipped (9 entries)

SEQ ID NO: 14220 - DNA, 21 bp, Artificial Sequence
  Description of Artificial Sequence: Synthetic oligonucleotide
gctcctgtgcacaccattttc

SEQ ID NO: 14221-14229 - skipped (9 entries)

SEQ ID NO: 14230 - DNA, 21 bp, Artificial Sequence
  Description of Artificial Sequence: Synthetic oligonucleotide
cggctacctcttggctcctgt

SEQ ID NO: 14231-14239 - skipped (9 entries)

SEQ ID NO: 14240 - DNA, 21 bp, Artificial Sequence
  Description of Artificial Sequence: Synthetic oligonucleotide
ttacggctacctcttggctcc

SEQ ID NO: 14241-14249 - skipped (9 entries)

SEQ ID NO: 14250 - DNA, 21 bp, Artificial Sequence
  Description of Artificial Sequence: Synthetic oligonucleotide
cttacggctacctcttggctc

SEQ ID NO: 14251-14259 - skipped (9 entries)

SEQ ID NO: 14260 - DNA, 21 bp, Artificial Sequence
  Description of Artificial Sequence: Synthetic oligonucleotide
ctgccagtctggactgttctt

SEQ ID NO: 14261-14269 - skipped (9 entries)

SEQ ID NO: 14270 - DNA, 21 bp, Artificial Sequence
  Description of Artificial Sequence: Synthetic oligonucleotide
ttgctgccagtctggactgtt

SEQ ID NO: 14271-14279 - skipped (9 entries)

SEQ ID NO: 14280 - DNA, 21 bp, Artificial Sequence
  Description of Artificial Sequence: Synthetic oligonucleotide
cttgctgccagtctggactgt

SEQ ID NO: 14281-14289 - skipped (9 entries)

SEQ ID NO: 14290 - DNA, 21 bp, Artificial Sequence
  Description of Artificial Sequence: Synthetic oligonucleotide
tcttgctgccagtctggactg

SEQ ID NO: 14291-14299 - skipped (9 entries)

SEQ ID NO: 14300 - DNA, 21 bp, Artificial Sequence
  Description of Artificial Sequence: Synthetic oligonucleotide
tgtacaactctagcatatttt

SEQ ID NO: 14301-14309 - skipped (9 entries)

SEQ ID NO: 14310 - DNA, 21 bp, Artificial Sequence
  Description of Artificial Sequence: Synthetic oligonucleotide
gctggaaaacccaacttctgt

SEQ ID NO: 14311-14319 - skipped (9 entries)

SEQ ID NO: 14320 - DNA, 21 bp, Artificial Sequence
  Description of Artificial Sequence: Synthetic oligonucleotide
aagtccaagaacttagctgga

SEQ ID NO: 14321-14329 - skipped (9 entries)

SEQ ID NO: 14330 - DNA, 21 bp, Artificial Sequence
  Description of Artificial Sequence: Synthetic oligonucleotide
tgaatcttgaagtccaagaac

SEQ ID NO: 14331-14339 - skipped (9 entries)

SEQ ID NO: 14340 - DNA, 21 bp, Artificial Sequence
  Description of Artificial Sequence: Synthetic oligonucleotide
acatcacagctccccaccata

SEQ ID NO: 14341-14349 - skipped (9 entries)

SEQ ID NO: 14350 - DNA, 21 bp, Artificial Sequence
  Description of Artificial Sequence: Synthetic oligonucleotide
taaccttataggaaacttcac

SEQ ID NO: 14351-14359 - skipped (9 entries)

SEQ ID NO: 14360 - DNA, 21 bp, Artificial Sequence
  Description of Artificial Sequence: Synthetic oligonucleotide
gtgggtgagcacaaggccttc

SEQ ID NO: 14361-14369 - skipped (9 entries)

SEQ ID NO: 14370 - DNA, 21 bp, Artificial Sequence
  Description of Artificial Sequence: Synthetic oligonucleotide
ttggtgggtgagcacaaggcc

SEQ ID NO: 14371-14379 - skipped (9 entries)

SEQ ID NO: 14380 - DNA, 21 bp, Artificial Sequence
  Description of Artificial Sequence: Synthetic oligonucleotide
cctactaaattgttggtgggt

SEQ ID NO: 14381-14389 - skipped (9 entries)

SEQ ID NO: 14390 - DNA, 21 bp, Artificial Sequence
  Description of Artificial Sequence: Synthetic oligonucleotide
agacttacctactaaattgtt

SEQ ID NO: 14391-14399 - skipped (9 entries)

SEQ ID NO: 14400 - DNA, 21 bp, Artificial Sequence
  Description of Artificial Sequence: Synthetic oligonucleotide
cagacttacctactaaattgt

SEQ ID NO: 14401-14409 - skipped (9 entries)

SEQ ID NO: 14410 - DNA, 21 bp, Artificial Sequence
  Description of Artificial Sequence: Synthetic oligonucleotide
aaccaggaaataactctggct

SEQ ID NO: 14411-14419 - skipped (9 entries)

SEQ ID NO: 14420 - DNA, 21 bp, Artificial Sequence
  Description of Artificial Sequence: Synthetic oligonucleotide
tgtagattaaaccaggaaata

SEQ ID NO: 14421-14429 - skipped (9 entries)

SEQ ID NO: 14430 - DNA, 21 bp, Artificial Sequence
  Description of Artificial Sequence: Synthetic oligonucleotide
atcattctgtagattaaacca

SEQ ID NO: 14431-14439 - skipped (9 entries)

SEQ ID NO: 14440 - DNA, 21 bp, Artificial Sequence
  Description of Artificial Sequence: Synthetic oligonucleotide
gatcattctgtagattaaacc

SEQ ID NO: 14441-14449 - skipped (9 entries)

SEQ ID NO: 14450 - DNA, 21 bp, Artificial Sequence
  Description of Artificial Sequence: Synthetic oligonucleotide
tgggtttgatcattctgtaga

SEQ ID NO: 14451-14459 - skipped (9 entries)

SEQ ID NO: 14460 - DNA, 21 bp, Artificial Sequence
  Description of Artificial Sequence: Synthetic oligonucleotide
cagaaacaaaaataaggagaa

SEQ ID NO: 14461-14469 - skipped (9 entries)

SEQ ID NO: 14470 - DNA, 21 bp, Artificial Sequence
  Description of Artificial Sequence: Synthetic oligonucleotide
ccagaaacaaaaataaggaga

SEQ ID NO: 14471-14479 - skipped (9 entries)

SEQ ID NO: 14480 - DNA, 21 bp, Artificial Sequence
  Description of Artificial Sequence: Synthetic oligonucleotide
tccagaaacaaaaataaggag

SEQ ID NO: 14481-14489 - skipped (9 entries)

SEQ ID NO: 14490 - DNA, 21 bp, Artificial Sequence
  Description of Artificial Sequence: Synthetic oligonucleotide
atacaacttttccagaaacaa

SEQ ID NO: 14491-14499 - skipped (9 entries)

SEQ ID NO: 14500 - DNA, 21 bp, Artificial Sequence
  Description of Artificial Sequence: Synthetic oligonucleotide
cctgttaatacaacttttcca

SEQ ID NO: 14501-14509 - skipped (9 entries)

SEQ ID NO: 14510 - DNA, 21 bp, Artificial Sequence
  Description of Artificial Sequence: Synthetic oligonucleotide
caacttacctgttaatacaac

SEQ ID NO: 14511-14519 - skipped (9 entries)

SEQ ID NO: 14520 - DNA, 21 bp, Artificial Sequence
  Description of Artificial Sequence: Synthetic oligonucleotide
ctgttacaacttacctgttaa

SEQ ID NO: 14521-14529 - skipped (9 entries)

SEQ ID NO: 14530 - DNA, 21 bp, Artificial Sequence
  Description of Artificial Sequence: Synthetic oligonucleotide
ataaatttctgctctgacttt

SEQ ID NO: 14531-14539 - skipped (9 entries)

SEQ ID NO: 14540 - DNA, 21 bp, Artificial Sequence
  Description of Artificial Sequence: Synthetic oligonucleotide
aaatgcttcataaatttctgc

SEQ ID NO: 14541-14549 - skipped (9 entries)

SEQ ID NO: 14550 - DNA, 21 bp, Artificial Sequence
  Description of Artificial Sequence: Synthetic oligonucleotide
caaatgcttcataaatttctg

SEQ ID NO: 14551-14559 - skipped (9 entries)

SEQ ID NO: 14560 - DNA, 21 bp, Artificial Sequence
  Description of Artificial Sequence: Synthetic oligonucleotide
tcaaatgcttcataaatttct

SEQ ID NO: 14561-14569 - skipped (9 entries)

SEQ ID NO: 14570 - DNA, 21 bp, Artificial Sequence
  Description of Artificial Sequence: Synthetic oligonucleotide
ctgaatccctttagaataggg

SEQ ID NO: 14571-14579 - skipped (9 entries)

SEQ ID NO: 14580 - DNA, 21 bp, Artificial Sequence
  Description of Artificial Sequence: Synthetic oligonucleotide
cgtcgtcttcctgaatccctt

SEQ ID NO: 14581-14589 - skipped (9 entries)

SEQ ID NO: 14590 - DNA, 21 bp, Artificial Sequence
  Description of Artificial Sequence: Synthetic oligonucleotide
gggggctatcattgtagtgag

SEQ ID NO: 14591-14599 - skipped (9 entries)

SEQ ID NO: 14600 - DNA, 21 bp, Artificial Sequence
  Description of Artificial Sequence: Synthetic oligonucleotide
ggggctatcattgtagtgagt

SEQ ID NO: 14601-14609 - skipped (9 entries)

SEQ ID NO: 14610 - DNA, 21 bp, Artificial Sequence
  Description of Artificial Sequence: Synthetic oligonucleotide
tagtgagtggcggccctggga

SEQ ID NO: 14611-14619 - skipped (9 entries)

SEQ ID NO: 14620 - DNA, 21 bp, Artificial Sequence
  Description of Artificial Sequence: Synthetic oligonucleotide
actcccactgggcccaacaac

SEQ ID NO: 14621-14629 - skipped (9 entries)

SEQ ID NO: 14630 - DNA, 21 bp, Artificial Sequence
  Description of Artificial Sequence: Synthetic oligonucleotide
tgccctgctggacagcagcag

SEQ ID NO: 14631-14639 - skipped (9 entries)

SEQ ID NO: 14640 - DNA, 21 bp, Artificial Sequence
  Description of Artificial Sequence: Synthetic oligonucleotide
gtccggacccaacccttctac

SEQ ID NO: 14641-14649 - skipped (9 entries)

SEQ ID NO: 14650 - DNA, 21 bp, Artificial Sequence
  Description of Artificial Sequence: Synthetic oligonucleotide
tacctcctttgagcccatcaa

SEQ ID NO: 14651-14659 - skipped (9 entries)

SEQ ID NO: 14660 - DNA, 21 bp, Artificial Sequence
  Description of Artificial Sequence: Synthetic oligonucleotide
gagcccatcaaggcagacccc

SEQ ID NO: 14661-14669 - skipped (9 entries)

SEQ ID NO: 14670 - DNA, 21 bp, Artificial Sequence
  Description of Artificial Sequence: Synthetic oligonucleotide
agcccatcaaggcagacccca

SEQ ID NO: 14671-14679 - skipped (9 entries)

SEQ ID NO: 14680 - DNA, 21 bp, Artificial Sequence
  Description of Artificial Sequence: Synthetic oligonucleotide
cttgtttttcagttttggaac

SEQ ID NO: 14681-14689 - skipped (9 entries)

SEQ ID NO: 14690 - DNA, 21 bp, Artificial Sequence
  Description of Artificial Sequence: Synthetic oligonucleotide
tttttcagttttggaactccc

SEQ ID NO: 14691-14699 - skipped (9 entries)

SEQ ID NO: 14700 - DNA, 21 bp, Artificial Sequence
  Description of Artificial Sequence: Synthetic oligonucleotide
ttcagttttggaactccccaa

SEQ ID NO: 14701-14709 - skipped (9 entries)

SEQ ID NO: 14710 - DNA, 21 bp, Artificial Sequence
  Description of Artificial Sequence: Synthetic oligonucleotide
tcagttttggaactccccaaa

SEQ ID NO: 14711-14719 - skipped (9 entries)

SEQ ID NO: 14720 - DNA, 21 bp, Artificial Sequence
  Description of Artificial Sequence: Synthetic oligonucleotide
cagttttggaactccccaaag

SEQ ID NO: 14721-14729 - skipped (9 entries)

SEQ ID NO: 14730 - DNA, 21 bp, Artificial Sequence
  Description of Artificial Sequence: Synthetic oligonucleotide
agttttggaactccccaaaga

SEQ ID NO: 14731-14739 - skipped (9 entries)

SEQ ID NO: 14740 - DNA, 21 bp, Artificial Sequence
  Description of Artificial Sequence: Synthetic oligonucleotide
tggaactccccaaagagctgt

SEQ ID NO: 14741-14749 - skipped (9 entries)

SEQ ID NO: 14750 - DNA, 21 bp, Artificial Sequence
  Description of Artificial Sequence: Synthetic oligonucleotide
ggaactccccaaagagctgtc

SEQ ID NO: 14751-14759 - skipped (9 entries)

SEQ ID NO: 14760 - DNA, 21 bp, Artificial Sequence
  Description of Artificial Sequence: Synthetic oligonucleotide
ccagagtgcatgagctcggag

SEQ ID NO: 14761-14769 - skipped (9 entries)

SEQ ID NO: 14770 - DNA, 21 bp, Artificial Sequence
  Description of Artificial Sequence: Synthetic oligonucleotide
gcccctctgcttcgtctttct

SEQ ID NO: 14771-14779 - skipped (9 entries)

SEQ ID NO: 14780 - DNA, 21 bp, Artificial Sequence
  Description of Artificial Sequence: Synthetic oligonucleotide
cccctctgcttcgtctttctc

SEQ ID NO: 14781-14789 - skipped (9 entries)

SEQ ID NO: 14790 - DNA, 21 bp, Artificial Sequence
  Description of Artificial Sequence: Synthetic oligonucleotide
gtctttctccacccccgggag

SEQ ID NO: 14791-14799 - skipped (9 entries)

SEQ ID NO: 14800 - DNA, 21 bp, Artificial Sequence
  Description of Artificial Sequence: Synthetic oligonucleotide
ctccacccccgggagaccacg

SEQ ID NO: 14801-14809 - skipped (9 entries)

SEQ ID NO: 14810 - DNA, 21 bp, Artificial Sequence
  Description of Artificial Sequence: Synthetic oligonucleotide
tccacccccgggagaccacga

SEQ ID NO: 14811-14819 - skipped (9 entries)

SEQ ID NO: 14820 - DNA, 21 bp, Artificial Sequence
  Description of Artificial Sequence: Synthetic oligonucleotide
tatctacaacctggacgagag

SEQ ID NO: 14821-14829 - skipped (9 entries)

SEQ ID NO: 14830 - DNA, 21 bp, Artificial Sequence
  Description of Artificial Sequence: Synthetic oligonucleotide
gatgtgcctgttctcaacctc

SEQ ID NO: 14831-14839 - skipped (9 entries)

SEQ ID NO: 14840 - DNA, 21 bp, Artificial Sequence
  Description of Artificial Sequence: Synthetic oligonucleotide
atgtgcctgttctcaacctct

SEQ ID NO: 14841-14849 - skipped (9 entries)

SEQ ID NO: 14850 - DNA, 21 bp, Artificial Sequence
  Description of Artificial Sequence: Synthetic oligonucleotide
tgcactgccagggacagcagt

SEQ ID NO: 14851-14859 - skipped (9 entries)

SEQ ID NO: 14860 - DNA, 21 bp, Artificial Sequence
  Description of Artificial Sequence: Synthetic oligonucleotide
cctggacttctgcactgccag

SEQ ID NO: 14861-14869 - skipped (9 entries)

SEQ ID NO: 14870 - DNA, 21 bp, Artificial Sequence
  Description of Artificial Sequence: Synthetic oligonucleotide
ctatcagtcccagggccgcca

SEQ ID NO: 14871-14879 - skipped (9 entries)

SEQ ID NO: 14880 - DNA, 21 bp, Artificial Sequence
  Description of Artificial Sequence: Synthetic oligonucleotide
ggcccagtgggagtgaactga

SEQ ID NO: 14881-14889 - skipped (9 entries)

SEQ ID NO: 14890 - DNA, 21 bp, Artificial Sequence
  Description of Artificial Sequence: Synthetic oligonucleotide
ttgggcccagtgggagtgaac

SEQ ID NO: 14891-14899 - skipped (9 entries)

SEQ ID NO: 14900 - DNA, 21 bp, Artificial Sequence
  Description of Artificial Sequence: Synthetic oligonucleotide
ggtccggacgaactgctgctg

SEQ ID NO: 14901-14909 - skipped (9 entries)

SEQ ID NO: 14910 - DNA, 21 bp, Artificial Sequence
  Description of Artificial Sequence: Synthetic oligonucleotide
atgggctcaaaggaggtagaa

SEQ ID NO: 14911-14919 - skipped (9 entries)

SEQ ID NO: 14920 - DNA, 21 bp, Artificial Sequence
  Description of Artificial Sequence: Synthetic oligonucleotide
tgacagctctttggggagttc

SEQ ID NO: 14921-14929 - skipped (9 entries)

SEQ ID NO: 14930 - DNA, 21 bp, Artificial Sequence
  Description of Artificial Sequence: Synthetic oligonucleotide
ctgacagctctttggggagtt

SEQ ID NO: 14931-14939 - skipped (9 entries)

SEQ ID NO: 14940 - DNA, 21 bp, Artificial Sequence
  Description of Artificial Sequence: Synthetic oligonucleotide
tgaggacatcaactcctccag

SEQ ID NO: 14941-14949 - skipped (9 entries)

SEQ ID NO: 14950 - DNA, 21 bp, Artificial Sequence
  Description of Artificial Sequence: Synthetic oligonucleotide
cagggccacccaccttctgag

SEQ ID NO: 14951-14959 - skipped (9 entries)

SEQ ID NO: 14960 - DNA, 21 bp, Artificial Sequence
  Description of Artificial Sequence: Synthetic oligonucleotide
tagatataatcgtggtctccc

SEQ ID NO: 14961-14969 - skipped (9 entries)

SEQ ID NO: 14970 - DNA, 21 bp, Artificial Sequence
  Description of Artificial Sequence: Synthetic oligonucleotide
actctcgtccaggttgtagat

SEQ ID NO: 14971-14979 - skipped (9 entries)

SEQ ID NO: 14980 - DNA, 21 bp, Artificial Sequence
  Description of Artificial Sequence: Synthetic oligonucleotide
tgggggttcacccacttgtag

SEQ ID NO: 14981-14989 - skipped (9 entries)

SEQ ID NO: 14990 - DNA, 21 bp, Artificial Sequence
  Description of Artificial Sequence: Synthetic oligonucleotide
acccacttgtaggtgccctca

SEQ ID NO: 14991-14999 - skipped (9 entries)

SEQ ID NO: 15000 - DNA, 21 bp, Artificial Sequence
  Description of Artificial Sequence: Synthetic oligonucleotide
taggtgccctcatactggaaa

SEQ ID NO: 15001-15009 - skipped (9 entries)

SEQ ID NO: 15010 - DNA, 21 bp, Artificial Sequence
  Description of Artificial Sequence: Synthetic oligonucleotide
atcagctcgtctgcctccgtg

SEQ ID NO: 15011-15019 - skipped (9 entries)

SEQ ID NO: 15020 - DNA, 21 bp, Artificial Sequence
  Description of Artificial Sequence: Synthetic oligonucleotide
cctcacctgccataaatatag

SEQ ID NO: 15021-15029 - skipped (9 entries)

SEQ ID NO: 15030 - DNA, 21 bp, Artificial Sequence
  Description of Artificial Sequence: Synthetic oligonucleotide
ctcacctgccataaatatagg

SEQ ID NO: 15031-15039 - skipped (9 entries)

SEQ ID NO: 15040 - DNA, 21 bp, Artificial Sequence
  Description of Artificial Sequence: Synthetic oligonucleotide
ggcttctccagctcaatctgg

SEQ ID NO: 15041-15049 - skipped (9 entries)

SEQ ID NO: 15050 - DNA, 21 bp, Artificial Sequence
  Description of Artificial Sequence: Synthetic oligonucleotide
tccagctcaatctggtgcagc

SEQ ID NO: 15051-15059 - skipped (9 entries)

SEQ ID NO: 15060 - DNA, 21 bp, Artificial Sequence
  Description of Artificial Sequence: Synthetic oligonucleotide
tctgtagggcaccttgtatct

SEQ ID NO: 15061-15069 - skipped (9 entries)

SEQ ID NO: 15070 - DNA, 21 bp, Artificial Sequence
  Description of Artificial Sequence: Synthetic oligonucleotide
tatctgttgccgtaggtcagg

SEQ ID NO: 15071-15079 - skipped (9 entries)

SEQ ID NO: 15080 - DNA, 21 bp, Artificial Sequence
  Description of Artificial Sequence: Synthetic oligonucleotide
ccgtaggtcaggtccagctcc

SEQ ID NO: 15081-15089 - skipped (9 entries)

SEQ ID NO: 15090 - DNA, 21 bp, Artificial Sequence
  Description of Artificial Sequence: Synthetic oligonucleotide
aagaacatgcccggcttcttg

SEQ ID NO: 15091-15099 - skipped (9 entries)

SEQ ID NO: 15100 - DNA, 21 bp, Artificial Sequence
  Description of Artificial Sequence: Synthetic oligonucleotide
ttggtcatcatcttggtgtac

SEQ ID NO: 15101-15109 - skipped (9 entries)

SEQ ID NO: 15110 - DNA, 21 bp, Artificial Sequence
  Description of Artificial Sequence: Synthetic oligonucleotide
gtcatcatcttggtgtacacg

SEQ ID NO: 15111-15119 - skipped (9 entries)

SEQ ID NO: 15120 - DNA, 21 bp, Artificial Sequence
  Description of Artificial Sequence: Synthetic oligonucleotide
gtgtacacggcctcgttgggc

SEQ ID NO: 15121-15129 - skipped (9 entries)

SEQ ID NO: 15130 - DNA, 21 bp, Artificial Sequence
  Description of Artificial Sequence: Synthetic oligonucleotide
ggctgcacgcggatcaccagc

SEQ ID NO: 15131-15139 - skipped (9 entries)

SEQ ID NO: 15140 - DNA, 21 bp, Artificial Sequence
  Description of Artificial Sequence: Synthetic oligonucleotide
cgcttgcactgctggtggaag

SEQ ID NO: 15141-15149 - skipped (9 entries)

SEQ ID NO: 15150 - DNA, 21 bp, Artificial Sequence
  Description of Artificial Sequence: Synthetic oligonucleotide
cactgctggtggaagatgtcg

SEQ ID NO: 15151-15159 - skipped (9 entries)

SEQ ID NO: 15160 - DNA, 21 bp, Artificial Sequence
  Description of Artificial Sequence: Synthetic oligonucleotide
cgctcgttcagggccttgccg

SEQ ID NO: 15161-15169 - skipped (9 entries)

SEQ ID NO: 15170 - DNA, 21 bp, Artificial Sequence
  Description of Artificial Sequence: Synthetic oligonucleotide
agggccttgccgcagcgcagg

SEQ ID NO: 15171-15179 - skipped (9 entries)

SEQ ID NO: 15180 - DNA, 21 bp, Artificial Sequence
  Description of Artificial Sequence: Synthetic oligonucleotide
ccgcagcgcaggatgaagggc

SEQ ID NO: 15181-15189 - skipped (9 entries)

SEQ ID NO: 15190 - DNA, 21 bp, Artificial Sequence
  Description of Artificial Sequence: Synthetic oligonucleotide
cagtatgagggcacctacaag

SEQ ID NO: 15191-15199 - skipped (9 entries)

SEQ ID NO: 15200 - DNA, 21 bp, Artificial Sequence
  Description of Artificial Sequence: Synthetic oligonucleotide
ccagtatgagggcacctacaa

SEQ ID NO: 15201-15209 - skipped (9 entries)

SEQ ID NO: 15210 - DNA, 21 bp, Artificial Sequence
  Description of Artificial Sequence: Synthetic oligonucleotide
agctggagaagcccaagccca

SEQ ID NO: 15211-15219 - skipped (9 entries)

SEQ ID NO: 15220 - DNA, 21 bp, Artificial Sequence
  Description of Artificial Sequence: Synthetic oligonucleotide
accccactgctgcaccagatt

SEQ ID NO: 15221-15229 - skipped (9 entries)

SEQ ID NO: 15230 - DNA, 21 bp, Artificial Sequence
  Description of Artificial Sequence: Synthetic oligonucleotide
caccccactgctgcaccagat

SEQ ID NO: 15231-15239 - skipped (9 entries)

SEQ ID NO: 15240 - DNA, 21 bp, Artificial Sequence
  Description of Artificial Sequence: Synthetic oligonucleotide
tcaccccactgctgcaccaga

SEQ ID NO: 15241-15249 - skipped (9 entries)

SEQ ID NO: 15250 - DNA, 21 bp, Artificial Sequence
  Description of Artificial Sequence: Synthetic oligonucleotide
tgcgggagccagatgcacttc

SEQ ID NO: 15251-15259 - skipped (9 entries)

SEQ ID NO: 15260 - DNA, 21 bp, Artificial Sequence
  Description of Artificial Sequence: Synthetic oligonucleotide
aaccccgaggagtcggagctg

SEQ ID NO: 15261-15269 - skipped (9 entries)

SEQ ID NO: 15270 - DNA, 21 bp, Artificial Sequence
  Description of Artificial Sequence: Synthetic oligonucleotide
ttcaaccccgaggagtcggag

SEQ ID NO: 15271-15279 - skipped (9 entries)

SEQ ID NO: 15280 - DNA, 21 bp, Artificial Sequence
  Description of Artificial Sequence: Synthetic oligonucleotide
caccagcagtgcaagcgcaac

SEQ ID NO: 15281-15289 - skipped (9 entries)

SEQ ID NO: 15290 - DNA, 21 bp, Artificial Sequence
  Description of Artificial Sequence: Synthetic oligonucleotide
catgatgtggccggcgacatc

SEQ ID NO: 15291-15299 - skipped (9 entries)

SEQ ID NO: 15300 - DNA, 21 bp, Artificial Sequence
  Description of Artificial Sequence: Synthetic oligonucleotide
atcctgcgctgcggcaaggcc

SEQ ID NO: 15301-15309 - skipped (9 entries)

SEQ ID NO: 15310 - DNA, 21 bp, Artificial Sequence
  Description of Artificial Sequence: Synthetic oligonucleotide
cgccacgtaggggtgcccttc

SEQ ID NO: 15311-15319 - skipped (9 entries)

SEQ ID NO: 15320 - DNA, 21 bp, Artificial Sequence
  Description of Artificial Sequence: Synthetic oligonucleotide
ccgccacgtaggggtgccctt

SEQ ID NO: 15321-15329 - skipped (9 entries)

SEQ ID NO: 15330 - DNA, 21 bp, Artificial Sequence
  Description of Artificial Sequence: Synthetic oligonucleotide
atgaagataaattgatagcac

SEQ ID NO: 15331-15339 - skipped (9 entries)

SEQ ID NO: 15340 - DNA, 21 bp, Artificial Sequence
  Description of Artificial Sequence: Synthetic oligonucleotide
atagcacaaaatctagaactt

SEQ ID NO: 15341-15349 - skipped (9 entries)

SEQ ID NO: 15350 - DNA, 21 bp, Artificial Sequence
  Description of Artificial Sequence: Synthetic oligonucleotide
atgaaaccataaaaattggtt

SEQ ID NO: 15351-15359 - skipped (9 entries)

SEQ ID NO: 15360 - DNA, 21 bp, Artificial Sequence
  Description of Artificial Sequence: Synthetic oligonucleotide
gtttgactaagcttaattgct

SEQ ID NO: 15361-15369 - skipped (9 entries)

SEQ ID NO: 15370 - DNA, 21 bp, Artificial Sequence
  Description of Artificial Sequence: Synthetic oligonucleotide
gactaagcttaattgctttct

SEQ ID NO: 15371-15379 - skipped (9 entries)

SEQ ID NO: 15380 - DNA, 21 bp, Artificial Sequence
  Description of Artificial Sequence: Synthetic oligonucleotide
actaagcttaattgctttctg

SEQ ID NO: 15381-15389 - skipped (9 entries)

SEQ ID NO: 15390 - DNA, 21 bp, Artificial Sequence
  Description of Artificial Sequence: Synthetic oligonucleotide
attgctttctggaacaggatc

SEQ ID NO: 15391-15399 - skipped (9 entries)

SEQ ID NO: 15400 - DNA, 21 bp, Artificial Sequence
  Description of Artificial Sequence: Synthetic oligonucleotide
ctttctggaacaggatctgaa

SEQ ID NO: 15401-15409 - skipped (9 entries)

SEQ ID NO: 15410 - DNA, 21 bp, Artificial Sequence
  Description of Artificial Sequence: Synthetic oligonucleotide
ctggaacaggatctgaaactg

SEQ ID NO: 15411-15419 - skipped (9 entries)

SEQ ID NO: 15420 - DNA, 21 bp, Artificial Sequence
  Description of Artificial Sequence: Synthetic oligonucleotide
tggaacaggatctgaaactgg

SEQ ID NO: 15421-15429 - skipped (9 entries)

SEQ ID NO: 15430 - DNA, 21 bp, Artificial Sequence
  Description of Artificial Sequence: Synthetic oligonucleotide
tctaatgtccgttaaaggtac

SEQ ID NO: 15431-15439 - skipped (9 entries)

SEQ ID NO: 15440 - DNA, 21 bp, Artificial Sequence
  Description of Artificial Sequence: Synthetic oligonucleotide
aaggtacgacaccacagagga

SEQ ID NO: 15441-15449 - skipped (9 entries)

SEQ ID NO: 15450 - DNA, 21 bp, Artificial Sequence
  Description of Artificial Sequence: Synthetic oligonucleotide
tttatacccatcaacactggt

SEQ ID NO: 15451-15459 - skipped (9 entries)

SEQ ID NO: 15460 - DNA, 21 bp, Artificial Sequence
  Description of Artificial Sequence: Synthetic oligonucleotide
atacccatcaacactggtaag

SEQ ID NO: 15461-15469 - skipped (9 entries)

SEQ ID NO: 15470 - DNA, 21 bp, Artificial Sequence
  Description of Artificial Sequence: Synthetic oligonucleotide
tacccatcaacactggtaaga

SEQ ID NO: 15471-15479 - skipped (9 entries)

SEQ ID NO: 15480 - DNA, 21 bp, Artificial Sequence
  Description of Artificial Sequence: Synthetic oligonucleotide
atcagctgaaaaggaaacagc

SEQ ID NO: 15481-15489 - skipped (9 entries)

SEQ ID NO: 15490 - DNA, 21 bp, Artificial Sequence
  Description of Artificial Sequence: Synthetic oligonucleotide
atgatgctaaactgttcagaa

SEQ ID NO: 15491-15499 - skipped (9 entries)

SEQ ID NO: 15500 - DNA, 21 bp, Artificial Sequence
  Description of Artificial Sequence: Synthetic oligonucleotide
agaaaacaacaaagaagagac

SEQ ID NO: 15501-15509 - skipped (9 entries)

SEQ ID NO: 15510 - DNA, 21 bp, Artificial Sequence
  Description of Artificial Sequence: Synthetic oligonucleotide
cttcttttaggatgtggatgt

SEQ ID NO: 15511-15519 - skipped (9 entries)

SEQ ID NO: 15520 - DNA, 21 bp, Artificial Sequence
  Description of Artificial Sequence: Synthetic oligonucleotide
ttcttttaggatgtggatgta

SEQ ID NO: 15521-15529 - skipped (9 entries)

SEQ ID NO: 15530 - DNA, 21 bp, Artificial Sequence
  Description of Artificial Sequence: Synthetic oligonucleotide
ttttaggatgtggatgtagaa

SEQ ID NO: 15531-15539 - skipped (9 entries)

SEQ ID NO: 15540 - DNA, 21 bp, Artificial Sequence
  Description of Artificial Sequence: Synthetic oligonucleotide
taggatgtggatgtagaagag

SEQ ID NO: 15541-15549 - skipped (9 entries)

SEQ ID NO: 15550 - DNA, 21 bp, Artificial Sequence
  Description of Artificial Sequence: Synthetic oligonucleotide
aggatgtggatgtagaagagg

SEQ ID NO: 15551-15559 - skipped (9 entries)

SEQ ID NO: 15560 - DNA, 21 bp, Artificial Sequence
  Description of Artificial Sequence: Synthetic oligonucleotide
ggatgtggatgtagaagaggc

SEQ ID NO: 15561-15569 - skipped (9 entries)

SEQ ID NO: 15570 - DNA, 21 bp, Artificial Sequence
  Description of Artificial Sequence: Synthetic oligonucleotide
tggggcagtatactgaagaac

SEQ ID NO: 15571-15579 - skipped (9 entries)

SEQ ID NO: 15580 - DNA, 21 bp, Artificial Sequence
  Description of Artificial Sequence: Synthetic oligonucleotide
ttcatcaattggcggggttcc

SEQ ID NO: 15581-15589 - skipped (9 entries)

SEQ ID NO: 15590 - DNA, 21 bp, Artificial Sequence
  Description of Artificial Sequence: Synthetic oligonucleotide
atcaattggcggggttccatt

SEQ ID NO: 15591-15599 - skipped (9 entries)

SEQ ID NO: 15600 - DNA, 21 bp, Artificial Sequence
  Description of Artificial Sequence: Synthetic oligonucleotide
gcggggttccatttttccagg

SEQ ID NO: 15601-15609 - skipped (9 entries)

SEQ ID NO: 15610 - DNA, 21 bp, Artificial Sequence
  Description of Artificial Sequence: Synthetic oligonucleotide
tcccgccttaaatccacagca

SEQ ID NO: 15611-15619 - skipped (9 entries)

SEQ ID NO: 15620 - DNA, 21 bp, Artificial Sequence
  Description of Artificial Sequence: Synthetic oligonucleotide
cccgccttaaatccacagcat

SEQ ID NO: 15621-15629 - skipped (9 entries)

SEQ ID NO: 15630 - DNA, 21 bp, Artificial Sequence
  Description of Artificial Sequence: Synthetic oligonucleotide
ccgccttaaatccacagcata

SEQ ID NO: 15631-15639 - skipped (9 entries)

SEQ ID NO: 15640 - DNA, 21 bp, Artificial Sequence
  Description of Artificial Sequence: Synthetic oligonucleotide
aatccacagcataaaaaatca

SEQ ID NO: 15641-15649 - skipped (9 entries)

SEQ ID NO: 15650 - DNA, 21 bp, Artificial Sequence
  Description of Artificial Sequence: Synthetic oligonucleotide
acacactggagaggtctaaag

SEQ ID NO: 15651-15659 - skipped (9 entries)

SEQ ID NO: 15660 - DNA, 21 bp, Artificial Sequence
  Description of Artificial Sequence: Synthetic oligonucleotide
gttacaaagagcagattacct

SEQ ID NO: 15661-15669 - skipped (9 entries)

SEQ ID NO: 15670 - DNA, 21 bp, Artificial Sequence
  Description of Artificial Sequence: Synthetic oligonucleotide
caaagagcagattacctctgc

SEQ ID NO: 15671-15679 - skipped (9 entries)

SEQ ID NO: 15680 - DNA, 21 bp, Artificial Sequence
  Description of Artificial Sequence: Synthetic oligonucleotide
cctctgcgagcccagatcaac

SEQ ID NO: 15681-15689 - skipped (9 entries)

SEQ ID NO: 15690 - DNA, 21 bp, Artificial Sequence
  Description of Artificial Sequence: Synthetic oligonucleotide
tagattttgtgctatcaattt

SEQ ID NO: 15691-15699 - skipped (9 entries)

SEQ ID NO: 15700 - DNA, 21 bp, Artificial Sequence
  Description of Artificial Sequence: Synthetic oligonucleotide
agttctagattttgtgctatc

SEQ ID NO: 15701-15709 - skipped (9 entries)

SEQ ID NO: 15710 - DNA, 21 bp, Artificial Sequence
  Description of Artificial Sequence: Synthetic oligonucleotide
attaagttctagattttgtgc

SEQ ID NO: 15711-15719 - skipped (9 entries)

SEQ ID NO: 15720 - DNA, 21 bp, Artificial Sequence
  Description of Artificial Sequence: Synthetic oligonucleotide
cattaagttctagattttgtg

SEQ ID NO: 15721-15729 - skipped (9 entries)

SEQ ID NO: 15730 - DNA, 21 bp, Artificial Sequence
  Description of Artificial Sequence: Synthetic oligonucleotide
tggtttcattaagttctagat

SEQ ID NO: 15731-15739 - skipped (9 entries)

SEQ ID NO: 15740 - DNA, 21 bp, Artificial Sequence
  Description of Artificial Sequence: Synthetic oligonucleotide
atggtttcattaagttctaga

SEQ ID NO: 15741-15749 - skipped (9 entries)

SEQ ID NO: 15750 - DNA, 21 bp, Artificial Sequence
  Description of Artificial Sequence: Synthetic oligonucleotide
tatggtttcattaagttctag

SEQ ID NO: 15751-15759 - skipped (9 entries)

SEQ ID NO: 15760 - DNA, 21 bp, Artificial Sequence
  Description of Artificial Sequence: Synthetic oligonucleotide
ttatggtttcattaagttcta

SEQ ID NO: 15761-15769 - skipped (9 entries)

SEQ ID NO: 15770 - DNA, 21 bp, Artificial Sequence
  Description of Artificial Sequence: Synthetic oligonucleotide
gtcaaaccaatttttatggtt

SEQ ID NO: 15771-15779 - skipped (9 entries)

SEQ ID NO: 15780 - DNA, 21 bp, Artificial Sequence
  Description of Artificial Sequence: Synthetic oligonucleotide
agcttagtcaaaccaattttt

SEQ ID NO: 15781-15789 - skipped (9 entries)

SEQ ID NO: 15790 - DNA, 21 bp, Artificial Sequence
  Description of Artificial Sequence: Synthetic oligonucleotide
cagaaagcaattaagcttagt

SEQ ID NO: 15791-15799 - skipped (9 entries)

SEQ ID NO: 15800 - DNA, 21 bp, Artificial Sequence
  Description of Artificial Sequence: Synthetic oligonucleotide
agatcctgttccagaaagcaa

SEQ ID NO: 15801-15809 - skipped (9 entries)

SEQ ID NO: 15810 - DNA, 21 bp, Artificial Sequence
  Description of Artificial Sequence: Synthetic oligonucleotide
cagatcctgttccagaaagca

SEQ ID NO: 15811-15819 - skipped (9 entries)

SEQ ID NO: 15820 - DNA, 21 bp, Artificial Sequence
  Description of Artificial Sequence: Synthetic oligonucleotide
ggatatccagtttcagatcct

SEQ ID NO: 15821-15829 - skipped (9 entries)

SEQ ID NO: 15830 - DNA, 21 bp, Artificial Sequence
  Description of Artificial Sequence: Synthetic oligonucleotide
aagtacctgttgggatatcca

SEQ ID NO: 15831-15839 - skipped (9 entries)

SEQ ID NO: 15840 - DNA, 21 bp, Artificial Sequence
  Description of Artificial Sequence: Synthetic oligonucleotide
aaagtacctgttgggatatcc

SEQ ID NO: 15841-15849 - skipped (9 entries)

SEQ ID NO: 15850 - DNA, 21 bp, Artificial Sequence
  Description of Artificial Sequence: Synthetic oligonucleotide
taaagtacctgttgggatatc

SEQ ID NO: 15851-15859 - skipped (9 entries)

SEQ ID NO: 15860 - DNA, 21 bp, Artificial Sequence
  Description of Artificial Sequence: Synthetic oligonucleotide
tcttttaaagtacctgttggg

SEQ ID NO: 15861-15869 - skipped (9 entries)

SEQ ID NO: 15870 - DNA, 21 bp, Artificial Sequence
  Description of Artificial Sequence: Synthetic oligonucleotide
ctcttttaaagtacctgttgg

SEQ ID NO: 15871-15879 - skipped (9 entries)

SEQ ID NO: 15880 - DNA, 21 bp, Artificial Sequence
  Description of Artificial Sequence: Synthetic oligonucleotide
tatttctcttttaaagtacct

SEQ ID NO: 15881-15889 - skipped (9 entries)

SEQ ID NO: 15890 - DNA, 21 bp, Artificial Sequence
  Description of Artificial Sequence: Synthetic oligonucleotide
atgggtataaataacttttcc

SEQ ID NO: 15891-15899 - skipped (9 entries)

SEQ ID NO: 15900 - DNA, 21 bp, Artificial Sequence
  Description of Artificial Sequence: Synthetic oligonucleotide
ccagtgttgatgggtataaat

SEQ ID NO: 15901-15909 - skipped (9 entries)

SEQ ID NO: 15910 - DNA, 21 bp, Artificial Sequence
  Description of Artificial Sequence: Synthetic oligonucleotide
ttaccagtgttgatgggtata

SEQ ID NO: 15911-15919 - skipped (9 entries)

SEQ ID NO: 15920 - DNA, 21 bp, Artificial Sequence
  Description of Artificial Sequence: Synthetic oligonucleotide
agttcttaccagtgttgatgg

SEQ ID NO: 15921-15929 - skipped (9 entries)

SEQ ID NO: 15930 - DNA, 21 bp, Artificial Sequence
  Description of Artificial Sequence: Synthetic oligonucleotide
acgtggttcagttcttaccag

SEQ ID NO: 15931-15939 - skipped (9 entries)

SEQ ID NO: 15940 - DNA, 21 bp, Artificial Sequence
  Description of Artificial Sequence: Synthetic oligonucleotide
agctgatcaaggagatgttca

SEQ ID NO: 15941-15949 - skipped (9 entries)

SEQ ID NO: 15950 - DNA, 21 bp, Artificial Sequence
  Description of Artificial Sequence: Synthetic oligonucleotide
cagctgatcaaggagatgttc

SEQ ID NO: 15951-15959 - skipped (9 entries)

SEQ ID NO: 15960 - DNA, 21 bp, Artificial Sequence
  Description of Artificial Sequence: Synthetic oligonucleotide
tcagctgatcaaggagatgtt

SEQ ID NO: 15961-15969 - skipped (9 entries)

SEQ ID NO: 15970 - DNA, 21 bp, Artificial Sequence
  Description of Artificial Sequence: Synthetic oligonucleotide
cttttcagctgatcaaggaga

SEQ ID NO: 15971-15979 - skipped (9 entries)

SEQ ID NO: 15980 - DNA, 21 bp, Artificial Sequence
  Description of Artificial Sequence: Synthetic oligonucleotide
ccttttcagctgatcaaggag

SEQ ID NO: 15981-15989 - skipped (9 entries)

SEQ ID NO: 15990 - DNA, 21 bp, Artificial Sequence
  Description of Artificial Sequence: Synthetic oligonucleotide
acagctcaggctgtttccttt

SEQ ID NO: 15991-15999 - skipped (9 entries)

SEQ ID NO: 16000 - DNA, 21 bp, Artificial Sequence
  Description of Artificial Sequence: Synthetic oligonucleotide
gcatcattaacagctcaggct

SEQ ID NO: 16001-16009 - skipped (9 entries)

SEQ ID NO: 16010 - DNA, 21 bp, Artificial Sequence
  Description of Artificial Sequence: Synthetic oligonucleotide
agcatcattaacagctcaggc

SEQ ID NO: 16011-16019 - skipped (9 entries)

SEQ ID NO: 16020 - DNA, 21 bp, Artificial Sequence
  Description of Artificial Sequence: Synthetic oligonucleotide
tgaacagtttagcatcattaa

SEQ ID NO: 16021-16029 - skipped (9 entries)

SEQ ID NO: 16030 - DNA, 21 bp, Artificial Sequence
  Description of Artificial Sequence: Synthetic oligonucleotide
ctgaacagtttagcatcatta

SEQ ID NO: 16031-16039 - skipped (9 entries)

SEQ ID NO: 16040 - DNA, 21 bp, Artificial Sequence
  Description of Artificial Sequence: Synthetic oligonucleotide
tctgaacagtttagcatcatt

SEQ ID NO: 16041-16049 - skipped (9 entries)

SEQ ID NO: 16050 - DNA, 21 bp, Artificial Sequence
  Description of Artificial Sequence: Synthetic oligonucleotide
ttttctgaacagtttagcatc

SEQ ID NO: 16051-16059 - skipped (9 entries)

SEQ ID NO: 16060 - DNA, 21 bp, Artificial Sequence
  Description of Artificial Sequence: Synthetic oligonucleotide
ttgttttctgaacagtttagc

SEQ ID NO: 16061-16069 - skipped (9 entries)

SEQ ID NO: 16070 - DNA, 21 bp, Artificial Sequence
  Description of Artificial Sequence: Synthetic oligonucleotide
tttgttgttttctgaacagtt

SEQ ID NO: 16071-16079 - skipped (9 entries)

SEQ ID NO: 16080 - DNA, 21 bp, Artificial Sequence
  Description of Artificial Sequence: Synthetic oligonucleotide
tctcttctttgttgttttctg

SEQ ID NO: 16081-16089 - skipped (9 entries)

SEQ ID NO: 16090 - DNA, 21 bp, Artificial Sequence
  Description of Artificial Sequence: Synthetic oligonucleotide
ccggaattgtctcttctttgt

SEQ ID NO: 16091-16099 - skipped (9 entries)

SEQ ID NO: 16100 - DNA, 21 bp, Artificial Sequence
  Description of Artificial Sequence: Synthetic oligonucleotide
accggaattgtctcttctttg

SEQ ID NO: 16101-16109 - skipped (9 entries)

SEQ ID NO: 16110 - DNA, 21 bp, Artificial Sequence
  Description of Artificial Sequence: Synthetic oligonucleotide
aatttaccggaattgtctctt

SEQ ID NO: 16111-16119 - skipped (9 entries)

SEQ ID NO: 16120 - DNA, 21 bp, Artificial Sequence
  Description of Artificial Sequence: Synthetic oligonucleotide
aaatttaccggaattgtctct

SEQ ID NO: 16121-16129 - skipped (9 entries)

SEQ ID NO: 16130 - DNA, 21 bp, Artificial Sequence
  Description of Artificial Sequence: Synthetic oligonucleotide
agtatactgccccagaactgc

SEQ ID NO: 16131-16139 - skipped (9 entries)

SEQ ID NO: 16140 - DNA, 21 bp, Artificial Sequence
  Description of Artificial Sequence: Synthetic oligonucleotide
ttcagtatactgccccagaac

SEQ ID NO: 16141-16149 - skipped (9 entries)

SEQ ID NO: 16150 - DNA, 21 bp, Artificial Sequence
  Description of Artificial Sequence: Synthetic oligonucleotide
gaggttcttcagtatactgcc

SEQ ID NO: 16151-16159 - skipped (9 entries)

SEQ ID NO: 16160 - DNA, 21 bp, Artificial Sequence
  Description of Artificial Sequence: Synthetic oligonucleotide
acttagaggttcttcagtata

SEQ ID NO: 16161-16169 - skipped (9 entries)

SEQ ID NO: 16170 - DNA, 21 bp, Artificial Sequence
  Description of Artificial Sequence: Synthetic oligonucleotide
atgaacaatccacaccagcat

SEQ ID NO: 16171-16179 - skipped (9 entries)

SEQ ID NO: 16180 - DNA, 21 bp, Artificial Sequence
  Description of Artificial Sequence: Synthetic oligonucleotide
tctgatatgacatacctggaa

SEQ ID NO: 16181-16189 - skipped (9 entries)

SEQ ID NO: 16190 - DNA, 21 bp, Artificial Sequence
  Description of Artificial Sequence: Synthetic oligonucleotide
tcttttccatgtgatttttta

SEQ ID NO: 16191-16199 - skipped (9 entries)

SEQ ID NO: 16200 - DNA, 21 bp, Artificial Sequence
  Description of Artificial Sequence: Synthetic oligonucleotide
gtcttttccatgtgatttttt

SEQ ID NO: 16201-16209 - skipped (9 entries)

SEQ ID NO: 16210 - DNA, 21 bp, Artificial Sequence
  Description of Artificial Sequence: Synthetic oligonucleotide
tttgtcttttccatgtgattt

SEQ ID NO: 16211-16219 - skipped (9 entries)

SEQ ID NO: 16220 - DNA, 21 bp, Artificial Sequence
  Description of Artificial Sequence: Synthetic oligonucleotide
ctttgtcttttccatgtgatt

SEQ ID NO: 16221-16229 - skipped (9 entries)

SEQ ID NO: 16230 - DNA, 21 bp, Artificial Sequence
  Description of Artificial Sequence: Synthetic oligonucleotide
tctttgtcttttccatgtgat

SEQ ID NO: 16231-16239 - skipped (9 entries)

SEQ ID NO: 16240 - DNA, 21 bp, Artificial Sequence
  Description of Artificial Sequence: Synthetic oligonucleotide
atgcctctgttttctttgtct

SEQ ID NO: 16241-16249 - skipped (9 entries)

SEQ ID NO: 16250 - DNA, 21 bp, Artificial Sequence
  Description of Artificial Sequence: Synthetic oligonucleotide
gacctctccagtgtgttaatg

SEQ ID NO: 16251-16259 - skipped (9 entries)

SEQ ID NO: 16260 - DNA, 21 bp, Artificial Sequence
  Description of Artificial Sequence: Synthetic oligonucleotide
agacctctccagtgtgttaat

SEQ ID NO: 16261-16269 - skipped (9 entries)

SEQ ID NO: 16270 - DNA, 21 bp, Artificial Sequence
  Description of Artificial Sequence: Synthetic oligonucleotide
cactttagacctctccagtgt

SEQ ID NO: 16271-16279 - skipped (9 entries)

SEQ ID NO: 16280 - DNA, 21 bp, Artificial Sequence
  Description of Artificial Sequence: Synthetic oligonucleotide
ttccactttagacctctccag

SEQ ID NO: 16281-16289 - skipped (9 entries)

SEQ ID NO: 16290 - DNA, 21 bp, Artificial Sequence
  Description of Artificial Sequence: Synthetic oligonucleotide
cttccactttagacctctcca

SEQ ID NO: 16291-16299 - skipped (9 entries)

SEQ ID NO: 16300 - DNA, 21 bp, Artificial Sequence
  Description of Artificial Sequence: Synthetic oligonucleotide
taaccaagtgctctgtagttt

SEQ ID NO: 16301-16309 - skipped (9 entries)

SEQ ID NO: 16310 - DNA, 21 bp, Artificial Sequence
  Description of Artificial Sequence: Synthetic oligonucleotide
gtaaccaagtgctctgtagtt

SEQ ID NO: 16311-16319 - skipped (9 entries)

SEQ ID NO: 16320 - DNA, 21 bp, Artificial Sequence
  Description of Artificial Sequence: Synthetic oligonucleotide
atctgggctcgcagaggtaat

SEQ ID NO: 16321-16329 - skipped (9 entries)

SEQ ID NO: 16330 - DNA, 21 bp, Artificial Sequence
  Description of Artificial Sequence: Synthetic oligonucleotide
aaggttgatctgggctcgcag

SEQ ID NO: 16331-16339 - skipped (9 entries)

SEQ ID NO: 16340 - DNA, 21 bp, Artificial Sequence
  Description of Artificial Sequence: Synthetic oligonucleotide
ccaacccccaagtgaattaaa

SEQ ID NO: 16341-16349 - skipped (9 entries)

SEQ ID NO: 16350 - DNA, 20 bp, Artificial Sequence
  Description of Artificial Sequence: Synthetic oligonucleotide
tctaggtatgacaacgaatt

SEQ ID NO: 16351-16359 - skipped (9 entries)

SEQ ID NO: 16360 - DNA, 20 bp, Artificial Sequence
  Description of Artificial Sequence: Synthetic oligonucleotide
agccccagcgtcaaaggtgg

SEQ ID NO: 16361-16369 - skipped (9 entries)

SEQ ID NO: 16370 - DNA, 20 bp, Artificial Sequence
  Description of Artificial Sequence: Synthetic oligonucleotide
attgtatccacagtgaatct

SEQ ID NO: 16371-16379 - skipped (9 entries)

SEQ ID NO: 16380 - DNA, 20 bp, Artificial Sequence
  Description of Artificial Sequence: Synthetic oligonucleotide
aaacgccgaatataatccca

SEQ ID NO: 16381-16389 - skipped (9 entries)

SEQ ID NO: 16390 - DNA, 20 bp, Artificial Sequence
  Description of Artificial Sequence: Synthetic oligonucleotide
accattgtagcggtttgctg

SEQ ID NO: 16391-16399 - skipped (9 entries)

SEQ ID NO: 16400 - DNA, 20 bp, Artificial Sequence
  Description of Artificial Sequence: Synthetic oligonucleotide
ggtttgctgcggtaatcatg

SEQ ID NO: 16401-16409 - skipped (9 entries)

SEQ ID NO: 16410 - DNA, 20 bp, Artificial Sequence
  Description of Artificial Sequence: Synthetic oligonucleotide
gataagagagccacgaacca

SEQ ID NO: 16411-16419 - skipped (9 entries)

SEQ ID NO: 16420 - DNA, 20 bp, Artificial Sequence
  Description of Artificial Sequence: Synthetic oligonucleotide
acggcactgattttcagttc

SEQ ID NO: 16421-16429 - skipped (9 entries)

SEQ ID NO: 16430 - DNA, 20 bp, Artificial Sequence
  Description of Artificial Sequence: Synthetic oligonucleotide
cggcactgattttcagttct

SEQ ID NO: 16431-16439 - skipped (9 entries)

SEQ ID NO: 16440 - DNA, 20 bp, Artificial Sequence
  Description of Artificial Sequence: Synthetic oligonucleotide
gattttcagttctgggaaaa

SEQ ID NO: 16441-16449 - skipped (9 entries)

SEQ ID NO: 16450 - DNA, 20 bp, Artificial Sequence
  Description of Artificial Sequence: Synthetic oligonucleotide
tctgggaaaatggtgtgcac

SEQ ID NO: 16451-16459 - skipped (9 entries)

SEQ ID NO: 16460 - DNA, 20 bp, Artificial Sequence
  Description of Artificial Sequence: Synthetic oligonucleotide
tggtgtgcacaggagccaag

SEQ ID NO: 16461-16469 - skipped (9 entries)

SEQ ID NO: 16470 - DNA, 20 bp, Artificial Sequence
  Description of Artificial Sequence: Synthetic oligonucleotide
tagtgaagaacagtccagac

SEQ ID NO: 16471-16479 - skipped (9 entries)

SEQ ID NO: 16480 - DNA, 20 bp, Artificial Sequence
  Description of Artificial Sequence: Synthetic oligonucleotide
tgctagagttgtacagaagt

SEQ ID NO: 16481-16489 - skipped (9 entries)

SEQ ID NO: 16490 - DNA, 20 bp, Artificial Sequence
  Description of Artificial Sequence: Synthetic oligonucleotide
gctagagttgtacagaagtt

SEQ ID NO: 16491-16499 - skipped (9 entries)

SEQ ID NO: 16500 - DNA, 20 bp, Artificial Sequence
  Description of Artificial Sequence: Synthetic oligonucleotide
gggttttccagctaagttct

SEQ ID NO: 16501-16509 - skipped (9 entries)

SEQ ID NO: 16510 - DNA, 20 bp, Artificial Sequence
  Description of Artificial Sequence: Synthetic oligonucleotide
ggacttcaagattcagaata

SEQ ID NO: 16511-16519 - skipped (9 entries)

SEQ ID NO: 16520 - DNA, 20 bp, Artificial Sequence
  Description of Artificial Sequence: Synthetic oligonucleotide
cttcaagattcagaatatgg

SEQ ID NO: 16521-16529 - skipped (9 entries)

SEQ ID NO: 16530 - DNA, 20 bp, Artificial Sequence
  Description of Artificial Sequence: Synthetic oligonucleotide
ttcaagattcagaatatggt

SEQ ID NO: 16531-16539 - skipped (9 entries)

SEQ ID NO: 16540 - DNA, 20 bp, Artificial Sequence
  Description of Artificial Sequence: Synthetic oligonucleotide
tcaagattcagaatatggtg

SEQ ID NO: 16541-16549 - skipped (9 entries)

SEQ ID NO: 16550 - DNA, 20 bp, Artificial Sequence
  Description of Artificial Sequence: Synthetic oligonucleotide
gtgatgtgaagtttcctata

SEQ ID NO: 16551-16559 - skipped (9 entries)

SEQ ID NO: 16560 - DNA, 20 bp, Artificial Sequence
  Description of Artificial Sequence: Synthetic oligonucleotide
aagtttcctataaggttaga

SEQ ID NO: 16561-16569 - skipped (9 entries)

SEQ ID NO: 16570 - DNA, 20 bp, Artificial Sequence
  Description of Artificial Sequence: Synthetic oligonucleotide
tcacccaccaacaatttagt

SEQ ID NO: 16571-16579 - skipped (9 entries)

SEQ ID NO: 16580 - DNA, 20 bp, Artificial Sequence
  Description of Artificial Sequence: Synthetic oligonucleotide
tatgagccagagttatttcc

SEQ ID NO: 16581-16589 - skipped (9 entries)

SEQ ID NO: 16590 - DNA, 20 bp, Artificial Sequence
  Description of Artificial Sequence: Synthetic oligonucleotide
gttctccttatttttgtttc

SEQ ID NO: 16591-16599 - skipped (9 entries)

SEQ ID NO: 16600 - DNA, 20 bp, Artificial Sequence
  Description of Artificial Sequence: Synthetic oligonucleotide
tctggaaaagttgtattaac

SEQ ID NO: 16601-16609 - skipped (9 entries)

SEQ ID NO: 16610 - DNA, 20 bp, Artificial Sequence
  Description of Artificial Sequence: Synthetic oligonucleotide
aaacatctaccctattctaa

SEQ ID NO: 16611-16619 - skipped (9 entries)

SEQ ID NO: 16620 - DNA, 20 bp, Artificial Sequence
  Description of Artificial Sequence: Synthetic oligonucleotide
accctattctaaagggattc

SEQ ID NO: 16621-16629 - skipped (9 entries)

SEQ ID NO: 16630 - DNA, 20 bp, Artificial Sequence
  Description of Artificial Sequence: Synthetic oligonucleotide
gattcaggaagacgacgtaa

SEQ ID NO: 16631-16639 - skipped (9 entries)

SEQ ID NO: 16640 - DNA, 20 bp, Artificial Sequence
  Description of Artificial Sequence: Synthetic oligonucleotide
cacgaagtgcaatggtcttt

SEQ ID NO: 16641-16649 - skipped (9 entries)

SEQ ID NO: 16650 - DNA, 20 bp, Artificial Sequence
  Description of Artificial Sequence: Synthetic oligonucleotide
gtttcgggcacgaagtgcaa

SEQ ID NO: 16651-16659 - skipped (9 entries)

SEQ ID NO: 16660 - DNA, 20 bp, Artificial Sequence
  Description of Artificial Sequence: Synthetic oligonucleotide
gggattatattcggcgtttc

SEQ ID NO: 16661-16669 - skipped (9 entries)

SEQ ID NO: 16670 - DNA, 20 bp, Artificial Sequence
  Description of Artificial Sequence: Synthetic oligonucleotide
tgggattatattcggcgttt

SEQ ID NO: 16671-16679 - skipped (9 entries)

SEQ ID NO: 16680 - DNA, 20 bp, Artificial Sequence
  Description of Artificial Sequence: Synthetic oligonucleotide
tctaaccttgggattatatt

SEQ ID NO: 16681-16689 - skipped (9 entries)

SEQ ID NO: 16690 - DNA, 20 bp, Artificial Sequence
  Description of Artificial Sequence: Synthetic oligonucleotide
attaaaatagatctaacctt

SEQ ID NO: 16691-16699 - skipped (9 entries)

SEQ ID NO: 16700 - DNA, 20 bp, Artificial Sequence
  Description of Artificial Sequence: Synthetic oligonucleotide
aaaatcagtgccgtggttcg

SEQ ID NO: 16701-16709 - skipped (9 entries)

SEQ ID NO: 16710 - DNA, 20 bp, Artificial Sequence
  Description of Artificial Sequence: Synthetic oligonucleotide
agaactgaaaatcagtgccg

SEQ ID NO: 16711-16719 - skipped (9 entries)

SEQ ID NO: 16720 - DNA, 20 bp, Artificial Sequence
  Description of Artificial Sequence: Synthetic oligonucleotide
aatttcttacggctacctct

SEQ ID NO: 16721-16729 - skipped (9 entries)

SEQ ID NO: 16730 - DNA, 20 bp, Artificial Sequence
  Description of Artificial Sequence: Synthetic oligonucleotide
agtctggactgttcttcact

SEQ ID NO: 16731-16739 - skipped (9 entries)

SEQ ID NO: 16740 - DNA, 20 bp, Artificial Sequence
  Description of Artificial Sequence: Synthetic oligonucleotide
atattttcttgctgccagtc

SEQ ID NO: 16741-16749 - skipped (9 entries)

SEQ ID NO: 16750 - DNA, 20 bp, Artificial Sequence
  Description of Artificial Sequence: Synthetic oligonucleotide
ttgaagtccaagaacttagc

SEQ ID NO: 16751-16759 - skipped (9 entries)

SEQ ID NO: 16760 - DNA, 20 bp, Artificial Sequence
  Description of Artificial Sequence: Synthetic oligonucleotide
acaaggccttctaaccttat

SEQ ID NO: 16761-16769 - skipped (9 entries)

SEQ ID NO: 16770 - DNA, 20 bp, Artificial Sequence
  Description of Artificial Sequence: Synthetic oligonucleotide
attgttggtgggtgagcaca

SEQ ID NO: 16771-16779 - skipped (9 entries)

SEQ ID NO: 16780 - DNA, 20 bp, Artificial Sequence
  Description of Artificial Sequence: Synthetic oligonucleotide
ttacctactaaattgttggt

SEQ ID NO: 16781-16789 - skipped (9 entries)

SEQ ID NO: 16790 - DNA, 20 bp, Artificial Sequence
  Description of Artificial Sequence: Synthetic oligonucleotide
cttacctactaaattgttgg

SEQ ID NO: 16791-16799 - skipped (9 entries)

SEQ ID NO: 16800 - DNA, 20 bp, Artificial Sequence
  Description of Artificial Sequence: Synthetic oligonucleotide
agacttacctactaaattgt

SEQ ID NO: 16801-16809 - skipped (9 entries)

SEQ ID NO: 16810 - DNA, 20 bp, Artificial Sequence
  Description of Artificial Sequence: Synthetic oligonucleotide
attaaaccaggaaataactc

SEQ ID NO: 16811-16819 - skipped (9 entries)

SEQ ID NO: 16820 - DNA, 20 bp, Artificial Sequence
  Description of Artificial Sequence: Synthetic oligonucleotide
atcattctgtagattaaacc

SEQ ID NO: 16821-16829 - skipped (9 entries)

SEQ ID NO: 16830 - DNA, 20 bp, Artificial Sequence
  Description of Artificial Sequence: Synthetic oligonucleotide
aaaataaggagaacaattct

SEQ ID NO: 16831-16839 - skipped (9 entries)

SEQ ID NO: 16840 - DNA, 20 bp, Artificial Sequence
  Description of Artificial Sequence: Synthetic oligonucleotide
cttttccagaaacaaaaata

SEQ ID NO: 16841-16849 - skipped (9 entries)

SEQ ID NO: 16850 - DNA, 20 bp, Artificial Sequence
  Description of Artificial Sequence: Synthetic oligonucleotide
tcctgaatccctttagaata

SEQ ID NO: 16851-16859 - skipped (9 entries)

SEQ ID NO: 16860 - DNA, 20 bp, Artificial Sequence
  Description of Artificial Sequence: Synthetic oligonucleotide
ttcctgaatccctttagaat

SEQ ID NO: 16861-16869 - skipped (9 entries)

SEQ ID NO: 16870 - DNA, 20 bp, Artificial Sequence
  Description of Artificial Sequence: Synthetic oligonucleotide
ctcactcccactgctgtccc

SEQ ID NO: 16871-16879 - skipped (9 entries)

SEQ ID NO: 16880 - DNA, 20 bp, Artificial Sequence
  Description of Artificial Sequence: Synthetic oligonucleotide
ccctggcagtgcagaagtcc

SEQ ID NO: 16881-16889 - skipped (9 entries)

SEQ ID NO: 16890 - DNA, 20 bp, Artificial Sequence
  Description of Artificial Sequence: Synthetic oligonucleotide
cctggcagtgcagaagtcca

SEQ ID NO: 16891-16899 - skipped (9 entries)

SEQ ID NO: 16900 - DNA, 20 bp, Artificial Sequence
  Description of Artificial Sequence: Synthetic oligonucleotide
cagtgcagaagtccagggaa

SEQ ID NO: 16901-16909 - skipped (9 entries)

SEQ ID NO: 16910 - DNA, 20 bp, Artificial Sequence
  Description of Artificial Sequence: Synthetic oligonucleotide
gcagaagtccagggaatggc

SEQ ID NO: 16911-16919 - skipped (9 entries)

SEQ ID NO: 16920 - DNA, 20 bp, Artificial Sequence
  Description of Artificial Sequence: Synthetic oligonucleotide
ggcccagcagctgagatcac

SEQ ID NO: 16921-16929 - skipped (9 entries)

SEQ ID NO: 16930 - DNA, 20 bp, Artificial Sequence
  Description of Artificial Sequence: Synthetic oligonucleotide
ggggctatcattgtagtgag

SEQ ID NO: 16931-16939 - skipped (9 entries)

SEQ ID NO: 16940 - DNA, 20 bp, Artificial Sequence
  Description of Artificial Sequence: Synthetic oligonucleotide
gctatcattgtagtgagtgg

SEQ ID NO: 16941-16949 - skipped (9 entries)

SEQ ID NO: 16950 - DNA, 20 bp, Artificial Sequence
  Description of Artificial Sequence: Synthetic oligonucleotide
attgtagtgagtggcggccc

SEQ ID NO: 16951-16959 - skipped (9 entries)

SEQ ID NO: 16960 - DNA, 20 bp, Artificial Sequence
  Description of Artificial Sequence: Synthetic oligonucleotide
ttgtagtgagtggcggccct

SEQ ID NO: 16961-16969 - skipped (9 entries)

SEQ ID NO: 16970 - DNA, 20 bp, Artificial Sequence
  Description of Artificial Sequence: Synthetic oligonucleotide
cggccctgggactgatagca

SEQ ID NO: 16971-16979 - skipped (9 entries)

SEQ ID NO: 16980 - DNA, 20 bp, Artificial Sequence
  Description of Artificial Sequence: Synthetic oligonucleotide
gggactgatagcaaggacag

SEQ ID NO: 16981-16989 - skipped (9 entries)

SEQ ID NO: 16990 - DNA, 20 bp, Artificial Sequence
  Description of Artificial Sequence: Synthetic oligonucleotide
tgagctcagttcactcccac

SEQ ID NO: 16991-16999 - skipped (9 entries)

SEQ ID NO: 17000 - DNA, 20 bp, Artificial Sequence
  Description of Artificial Sequence: Synthetic oligonucleotide
gagctcagttcactcccact

SEQ ID NO: 17001-17009 - skipped (9 entries)

SEQ ID NO: 17010 - DNA, 20 bp, Artificial Sequence
  Description of Artificial Sequence: Synthetic oligonucleotide
cccactgggcccaacaacac

SEQ ID NO: 17011-17019 - skipped (9 entries)

SEQ ID NO: 17020 - DNA, 20 bp, Artificial Sequence
  Description of Artificial Sequence: Synthetic oligonucleotide
gcccaacaacactggacacc

SEQ ID NO: 17021-17029 - skipped (9 entries)

SEQ ID NO: 17030 - DNA, 20 bp, Artificial Sequence
  Description of Artificial Sequence: Synthetic oligonucleotide
actgcagtcttctgccctgc

SEQ ID NO: 17031-17039 - skipped (9 entries)

SEQ ID NO: 17040 - DNA, 20 bp, Artificial Sequence
  Description of Artificial Sequence: Synthetic oligonucleotide
agtaacagcagcagttcgtc

SEQ ID NO: 17041-17049 - skipped (9 entries)

SEQ ID NO: 17050 - DNA, 20 bp, Artificial Sequence
  Description of Artificial Sequence: Synthetic oligonucleotide
tacctcctttgagcccatca

SEQ ID NO: 17051-17059 - skipped (9 entries)

SEQ ID NO: 17060 - DNA, 20 bp, Artificial Sequence
  Description of Artificial Sequence: Synthetic oligonucleotide
cccatcaaggcagaccccac

SEQ ID NO: 17061-17069 - skipped (9 entries)

SEQ ID NO: 17070 - DNA, 20 bp, Artificial Sequence
  Description of Artificial Sequence: Synthetic oligonucleotide
atcaaggcagaccccacagg

SEQ ID NO: 17071-17079 - skipped (9 entries)

SEQ ID NO: 17080 - DNA, 20 bp, Artificial Sequence
  Description of Artificial Sequence: Synthetic oligonucleotide
gaaatctttgatcccacacg

SEQ ID NO: 17081-17089 - skipped (9 entries)

SEQ ID NO: 17090 - DNA, 20 bp, Artificial Sequence
  Description of Artificial Sequence: Synthetic oligonucleotide
tctttgatcccacacgaggt

SEQ ID NO: 17091-17099 - skipped (9 entries)

SEQ ID NO: 17100 - DNA, 20 bp, Artificial Sequence
  Description of Artificial Sequence: Synthetic oligonucleotide
attcccagagtgcatgagct

SEQ ID NO: 17101-17109 - skipped (9 entries)

SEQ ID NO: 17110 - DNA, 20 bp, Artificial Sequence
  Description of Artificial Sequence: Synthetic oligonucleotide
gtgcatgagctcggagctgc

SEQ ID NO: 17111-17119 - skipped (9 entries)

SEQ ID NO: 17120 - DNA, 20 bp, Artificial Sequence
  Description of Artificial Sequence: Synthetic oligonucleotide
gaggagttgatgtcctcaga

SEQ ID NO: 17121-17129 - skipped (9 entries)

SEQ ID NO: 17130 - DNA, 20 bp, Artificial Sequence
  Description of Artificial Sequence: Synthetic oligonucleotide
gagttgatgtcctcagaagg

SEQ ID NO: 17131-17139 - skipped (9 entries)

SEQ ID NO: 17140 - DNA, 20 bp, Artificial Sequence
  Description of Artificial Sequence: Synthetic oligonucleotide
agttgatgtcctcagaaggt

SEQ ID NO: 17141-17149 - skipped (9 entries)

SEQ ID NO: 17150 - DNA, 20 bp, Artificial Sequence
  Description of Artificial Sequence: Synthetic oligonucleotide
gcttcgtctttctccacccc

SEQ ID NO: 17151-17159 - skipped (9 entries)

SEQ ID NO: 17160 - DNA, 20 bp, Artificial Sequence
  Description of Artificial Sequence: Synthetic oligonucleotide
cttcgtctttctccaccccc

SEQ ID NO: 17161-17169 - skipped (9 entries)

SEQ ID NO: 17170 - DNA, 20 bp, Artificial Sequence
  Description of Artificial Sequence: Synthetic oligonucleotide
ccacgattatatctacaacc

SEQ ID NO: 17171-17179 - skipped (9 entries)

SEQ ID NO: 17180 - DNA, 20 bp, Artificial Sequence
  Description of Artificial Sequence: Synthetic oligonucleotide
tacaacctggacgagagtga

SEQ ID NO: 17181-17189 - skipped (9 entries)

SEQ ID NO: 17190 - DNA, 20 bp, Artificial Sequence
  Description of Artificial Sequence: Synthetic oligonucleotide
gcactgccagggacagcagt

SEQ ID NO: 17191-17199 - skipped (9 entries)

SEQ ID NO: 17200 - DNA, 20 bp, Artificial Sequence
  Description of Artificial Sequence: Synthetic oligonucleotide
tgcactgccagggacagcag

SEQ ID NO: 17201-17209 - skipped (9 entries)

SEQ ID NO: 17210 - DNA, 20 bp, Artificial Sequence
  Description of Artificial Sequence: Synthetic oligonucleotide
cctggacttctgcactgcca

SEQ ID NO: 17211-17219 - skipped (9 entries)

SEQ ID NO: 17220 - DNA, 20 bp, Artificial Sequence
  Description of Artificial Sequence: Synthetic oligonucleotide
ccctggacttctgcactgcc

SEQ ID NO: 17221-17229 - skipped (9 entries)

SEQ ID NO: 17230 - DNA, 20 bp, Artificial Sequence
  Description of Artificial Sequence: Synthetic oligonucleotide
ctgctgggccagccattccc

SEQ ID NO: 17231-17239 - skipped (9 entries)

SEQ ID NO: 17240 - DNA, 20 bp, Artificial Sequence
  Description of Artificial Sequence: Synthetic oligonucleotide
tgtccttgctatcagtccca

SEQ ID NO: 17241-17249 - skipped (9 entries)

SEQ ID NO: 17250 - DNA, 20 bp, Artificial Sequence
  Description of Artificial Sequence: Synthetic oligonucleotide
ctgtccttgctatcagtccc

SEQ ID NO: 17251-17259 - skipped (9 entries)

SEQ ID NO: 17260 - DNA, 20 bp, Artificial Sequence
  Description of Artificial Sequence: Synthetic oligonucleotide
ccagtgttgttgggcccagt

SEQ ID NO: 17261-17269 - skipped (9 entries)

SEQ ID NO: 17270 - DNA, 20 bp, Artificial Sequence
  Description of Artificial Sequence: Synthetic oligonucleotide
tccagtgttgttgggcccag

SEQ ID NO: 17271-17279 - skipped (9 entries)

SEQ ID NO: 17280 - DNA, 20 bp, Artificial Sequence
  Description of Artificial Sequence: Synthetic oligonucleotide
gccgggtgtccagtgttgtt

SEQ ID NO: 17281-17289 - skipped (9 entries)

SEQ ID NO: 17290 - DNA, 20 bp, Artificial Sequence
  Description of Artificial Sequence: Synthetic oligonucleotide
ggccgggtgtccagtgttgt

SEQ ID NO: 17291-17299 - skipped (9 entries)

SEQ ID NO: 17300 - DNA, 20 bp, Artificial Sequence
  Description of Artificial Sequence: Synthetic oligonucleotide
agcagggcagaagactgcag

SEQ ID NO: 17301-17309 - skipped (9 entries)

SEQ ID NO: 17310 - DNA, 20 bp, Artificial Sequence
  Description of Artificial Sequence: Synthetic oligonucleotide
gctgctgctgctgtccagca

SEQ ID NO: 17311-17319 - skipped (9 entries)

SEQ ID NO: 17320 - DNA, 20 bp, Artificial Sequence
  Description of Artificial Sequence: Synthetic oligonucleotide
ggaggtagaagggttgggtc

SEQ ID NO: 17321-17329 - skipped (9 entries)

SEQ ID NO: 17330 - DNA, 20 bp, Artificial Sequence
  Description of Artificial Sequence: Synthetic oligonucleotide
tgggctcaaaggaggtagaa

SEQ ID NO: 17331-17339 - skipped (9 entries)

SEQ ID NO: 17340 - DNA, 20 bp, Artificial Sequence
  Description of Artificial Sequence: Synthetic oligonucleotide
atgggctcaaaggaggtaga

SEQ ID NO: 17341-17349 - skipped (9 entries)

SEQ ID NO: 17350 - DNA, 20 bp, Artificial Sequence
  Description of Artificial Sequence: Synthetic oligonucleotide
tgccttgatgggctcaaagg

SEQ ID NO: 17351-17359 - skipped (9 entries)

SEQ ID NO: 17360 - DNA, 20 bp, Artificial Sequence
  Description of Artificial Sequence: Synthetic oligonucleotide
gtctgccttgatgggctcaa

SEQ ID NO: 17361-17369 - skipped (9 entries)

SEQ ID NO: 17370 - DNA, 20 bp, Artificial Sequence
  Description of Artificial Sequence: Synthetic oligonucleotide
cctgtggggtctgccttgat

SEQ ID NO: 17371-17379 - skipped (9 entries)

SEQ ID NO: 17380 - DNA, 20 bp, Artificial Sequence
  Description of Artificial Sequence: Synthetic oligonucleotide
acctgtggggtctgccttga

SEQ ID NO: 17381-17389 - skipped (9 entries)

SEQ ID NO: 17390 - DNA, 20 bp, Artificial Sequence
  Description of Artificial Sequence: Synthetic oligonucleotide
gcaggtactcaccacctgtg

SEQ ID NO: 17391-17399 - skipped (9 entries)

SEQ ID NO: 17400 - DNA, 20 bp, Artificial Sequence
  Description of Artificial Sequence: Synthetic oligonucleotide
ggcaggtactcaccacctgt

SEQ ID NO: 17401-17409 - skipped (9 entries)

SEQ ID NO: 17410 - DNA, 20 bp, Artificial Sequence
  Description of Artificial Sequence: Synthetic oligonucleotide
gggcaggtactcaccacctg

SEQ ID NO: 17411-17419 - skipped (9 entries)

SEQ ID NO: 17420 - DNA, 20 bp, Artificial Sequence
  Description of Artificial Sequence: Synthetic oligonucleotide
agatttctgacagctctttg

SEQ ID NO: 17421-17429 - skipped (9 entries)

SEQ ID NO: 17430 - DNA, 20 bp, Artificial Sequence
  Description of Artificial Sequence: Synthetic oligonucleotide
aagatttctgacagctcttt

SEQ ID NO: 17431-17439 - skipped (9 entries)

SEQ ID NO: 17440 - DNA, 20 bp, Artificial Sequence
  Description of Artificial Sequence: Synthetic oligonucleotide
aaagatttctgacagctctt

SEQ ID NO: 17441-17449 - skipped (9 entries)

SEQ ID NO: 17450 - DNA, 20 bp, Artificial Sequence
  Description of Artificial Sequence: Synthetic oligonucleotide
tgcagcagcctacctcgtgt

SEQ ID NO: 17451-17459 - skipped (9 entries)

SEQ ID NO: 17460 - DNA, 20 bp, Artificial Sequence
  Description of Artificial Sequence: Synthetic oligonucleotide
atgcagcagcctacctcgtg

SEQ ID NO: 17461-17469 - skipped (9 entries)

SEQ ID NO: 17470 - DNA, 20 bp, Artificial Sequence
  Description of Artificial Sequence: Synthetic oligonucleotide
gctccgagctcatgcactct

SEQ ID NO: 17471-17479 - skipped (9 entries)

SEQ ID NO: 17480 - DNA, 20 bp, Artificial Sequence
  Description of Artificial Sequence: Synthetic oligonucleotide
agctccgagctcatgcactc

SEQ ID NO: 17481-17489 - skipped (9 entries)

SEQ ID NO: 17490 - DNA, 20 bp, Artificial Sequence
  Description of Artificial Sequence: Synthetic oligonucleotide
ccagggccacccaccttctg

SEQ ID NO: 17491-17499 - skipped (9 entries)

SEQ ID NO: 17500 - DNA, 20 bp, Artificial Sequence
  Description of Artificial Sequence: Synthetic oligonucleotide
tggagaaagacgaagcagag

SEQ ID NO: 17501-17509 - skipped (9 entries)

SEQ ID NO: 17510 - DNA, 20 bp, Artificial Sequence
  Description of Artificial Sequence: Synthetic oligonucleotide
gtggagaaagacgaagcaga

SEQ ID NO: 17511-17519 - skipped (9 entries)

SEQ ID NO: 17520 - DNA, 20 bp, Artificial Sequence
  Description of Artificial Sequence: Synthetic oligonucleotide
ggtggagaaagacgaagcag

SEQ ID NO: 17521-17529 - skipped (9 entries)

SEQ ID NO: 17530 - DNA, 20 bp, Artificial Sequence
  Description of Artificial Sequence: Synthetic oligonucleotide
taatcgtggtctcccggggg

SEQ ID NO: 17531-17539 - skipped (9 entries)

SEQ ID NO: 17540 - DNA, 20 bp, Artificial Sequence
  Description of Artificial Sequence: Synthetic oligonucleotide
atataatcgtggtctcccgg

SEQ ID NO: 17541-17549 - skipped (9 entries)

SEQ ID NO: 17550 - DNA, 20 bp, Artificial Sequence
  Description of Artificial Sequence: Synthetic oligonucleotide
gatataatcgtggtctcccg

SEQ ID NO: 17551-17559 - skipped (9 entries)

SEQ ID NO: 17560 - DNA, 20 bp, Artificial Sequence
  Description of Artificial Sequence: Synthetic oligonucleotide
agatataatcgtggtctccc

SEQ ID NO: 17561-17569 - skipped (9 entries)

SEQ ID NO: 17570 - DNA, 20 bp, Artificial Sequence
  Description of Artificial Sequence: Synthetic oligonucleotide
tagatataatcgtggtctcc

SEQ ID NO: 17571-17579 - skipped (9 entries)

SEQ ID NO: 17580 - DNA, 20 bp, Artificial Sequence
  Description of Artificial Sequence: Synthetic oligonucleotide
ccaggttgtagatataatcg

SEQ ID NO: 17581-17589 - skipped (9 entries)

SEQ ID NO: 17590 - DNA, 20 bp, Artificial Sequence
  Description of Artificial Sequence: Synthetic oligonucleotide
agacaccttcactctcgtcc

SEQ ID NO: 17591-17599 - skipped (9 entries)

SEQ ID NO: 17600 - DNA, 20 bp, Artificial Sequence
  Description of Artificial Sequence: Synthetic oligonucleotide
tgagaacaggcacatcaaag

SEQ ID NO: 17601-17609 - skipped (9 entries)

SEQ ID NO: 17610 - DNA, 20 bp, Artificial Sequence
  Description of Artificial Sequence: Synthetic oligonucleotide
gtgggggttcacccacttgt

SEQ ID NO: 17611-17619 - skipped (9 entries)

SEQ ID NO: 17620 - DNA, 20 bp, Artificial Sequence
  Description of Artificial Sequence: Synthetic oligonucleotide
acttgtaggtgccctcatac

SEQ ID NO: 17621-17629 - skipped (9 entries)

SEQ ID NO: 17630 - DNA, 20 bp, Artificial Sequence
  Description of Artificial Sequence: Synthetic oligonucleotide
catcagctcgtctgcctccg

SEQ ID NO: 17631-17639 - skipped (9 entries)

SEQ ID NO: 17640 - DNA, 20 bp, Artificial Sequence
  Description of Artificial Sequence: Synthetic oligonucleotide
atcagctcgtctgcctccgt

SEQ ID NO: 17641-17649 - skipped (9 entries)

SEQ ID NO: 17650 - DNA, 20 bp, Artificial Sequence
  Description of Artificial Sequence: Synthetic oligonucleotide
tcagctcgtctgcctccgtg

SEQ ID NO: 17651-17659 - skipped (9 entries)

SEQ ID NO: 17660 - DNA, 20 bp, Artificial Sequence
  Description of Artificial Sequence: Synthetic oligonucleotide
cgtctgcctccgtggggcct

SEQ ID NO: 17661-17669 - skipped (9 entries)

SEQ ID NO: 17670 - DNA, 20 bp, Artificial Sequence
  Description of Artificial Sequence: Synthetic oligonucleotide
tgcctccgtggggcctcggc

SEQ ID NO: 17671-17679 - skipped (9 entries)

SEQ ID NO: 17680 - DNA, 20 bp, Artificial Sequence
  Description of Artificial Sequence: Synthetic oligonucleotide
tcctcacctgccataaatat

SEQ ID NO: 17681-17689 - skipped (9 entries)

SEQ ID NO: 17690 - DNA, 20 bp, Artificial Sequence
  Description of Artificial Sequence: Synthetic oligonucleotide
cctcacctgccataaatata

SEQ ID NO: 17691-17699 - skipped (9 entries)

SEQ ID NO: 17700 - DNA, 20 bp, Artificial Sequence
  Description of Artificial Sequence: Synthetic oligonucleotide
ctcacctgccataaatatag

SEQ ID NO: 17701-17709 - skipped (9 entries)

SEQ ID NO: 17710 - DNA, 20 bp, Artificial Sequence
  Description of Artificial Sequence: Synthetic oligonucleotide
cctgccataaatatagggga

SEQ ID NO: 17711-17719 - skipped (9 entries)

SEQ ID NO: 17720 - DNA, 20 bp, Artificial Sequence
  Description of Artificial Sequence: Synthetic oligonucleotide
ctgccataaatataggggat

SEQ ID NO: 17721-17729 - skipped (9 entries)

SEQ ID NO: 17730 - DNA, 20 bp, Artificial Sequence
  Description of Artificial Sequence: Synthetic oligonucleotide
ataaatataggggatgggct

SEQ ID NO: 17731-17739 - skipped (9 entries)

SEQ ID NO: 17740 - DNA, 20 bp, Artificial Sequence
  Description of Artificial Sequence: Synthetic oligonucleotide
taaatataggggatgggctt

SEQ ID NO: 17741-17749 - skipped (9 entries)

SEQ ID NO: 17750 - DNA, 20 bp, Artificial Sequence
  Description of Artificial Sequence: Synthetic oligonucleotide
tgggcttctccagctcaatc

SEQ ID NO: 17751-17759 - skipped (9 entries)

SEQ ID NO: 17760 - DNA, 20 bp, Artificial Sequence
  Description of Artificial Sequence: Synthetic oligonucleotide
agctcaatctggtgcagcag

SEQ ID NO: 17761-17769 - skipped (9 entries)

SEQ ID NO: 17770 - DNA, 20 bp, Artificial Sequence
  Description of Artificial Sequence: Synthetic oligonucleotide
gctcaatctggtgcagcagt

SEQ ID NO: 17771-17779 - skipped (9 entries)

SEQ ID NO: 17780 - DNA, 20 bp, Artificial Sequence
  Description of Artificial Sequence: Synthetic oligonucleotide
ctcaatctggtgcagcagtg

SEQ ID NO: 17781-17789 - skipped (9 entries)

SEQ ID NO: 17790 - DNA, 20 bp, Artificial Sequence
  Description of Artificial Sequence: Synthetic oligonucleotide
cagtggggtgaaaatacgcc

SEQ ID NO: 17791-17799 - skipped (9 entries)

SEQ ID NO: 17800 - DNA, 20 bp, Artificial Sequence
  Description of Artificial Sequence: Synthetic oligonucleotide
tgaaaatacgccaggcctca

SEQ ID NO: 17801-17809 - skipped (9 entries)

SEQ ID NO: 17810 - DNA, 20 bp, Artificial Sequence
  Description of Artificial Sequence: Synthetic oligonucleotide
cctcacggagctcgtcgctg

SEQ ID NO: 17811-17819 - skipped (9 entries)

SEQ ID NO: 17820 - DNA, 20 bp, Artificial Sequence
  Description of Artificial Sequence: Synthetic oligonucleotide
acctgcgcacgaagtgcatc

SEQ ID NO: 17821-17829 - skipped (9 entries)

SEQ ID NO: 17830 - DNA, 20 bp, Artificial Sequence
  Description of Artificial Sequence: Synthetic oligonucleotide
ggctcccgcagaagacgtcc

SEQ ID NO: 17831-17839 - skipped (9 entries)

SEQ ID NO: 17840 - DNA, 20 bp, Artificial Sequence
  Description of Artificial Sequence: Synthetic oligonucleotide
cgcagaagacgtccaggatg

SEQ ID NO: 17841-17849 - skipped (9 entries)

SEQ ID NO: 17850 - DNA, 20 bp, Artificial Sequence
  Description of Artificial Sequence: Synthetic oligonucleotide
gtccaggatgaggcgctcat

SEQ ID NO: 17851-17859 - skipped (9 entries)

SEQ ID NO: 17860 - DNA, 20 bp, Artificial Sequence
  Description of Artificial Sequence: Synthetic oligonucleotide
atgaggcgctcataggcgtc

SEQ ID NO: 17861-17869 - skipped (9 entries)

SEQ ID NO: 17870 - DNA, 20 bp, Artificial Sequence
  Description of Artificial Sequence: Synthetic oligonucleotide
tgaggcgctcataggcgtca

SEQ ID NO: 17871-17879 - skipped (9 entries)

SEQ ID NO: 17880 - DNA, 20 bp, Artificial Sequence
  Description of Artificial Sequence: Synthetic oligonucleotide
caccttgtatctgttgccgt

SEQ ID NO: 17881-17889 - skipped (9 entries)

SEQ ID NO: 17890 - DNA, 20 bp, Artificial Sequence
  Description of Artificial Sequence: Synthetic oligonucleotide
tgtatctgttgccgtaggtc

SEQ ID NO: 17891-17899 - skipped (9 entries)

SEQ ID NO: 17900 - DNA, 20 bp, Artificial Sequence
  Description of Artificial Sequence: Synthetic oligonucleotide
caggtccagctccgactcct

SEQ ID NO: 17901-17909 - skipped (9 entries)

SEQ ID NO: 17910 - DNA, 20 bp, Artificial Sequence
  Description of Artificial Sequence: Synthetic oligonucleotide
aggtccagctccgactcctc

SEQ ID NO: 17911-17919 - skipped (9 entries)

SEQ ID NO: 17920 - DNA, 20 bp, Artificial Sequence
  Description of Artificial Sequence: Synthetic oligonucleotide
ggtccagctccgactcctcg

SEQ ID NO: 17921-17929 - skipped (9 entries)

SEQ ID NO: 17930 - DNA, 20 bp, Artificial Sequence
  Description of Artificial Sequence: Synthetic oligonucleotide
tcggggttgaagaacatgcc

SEQ ID NO: 17931-17939 - skipped (9 entries)

SEQ ID NO: 17940 - DNA, 20 bp, Artificial Sequence
  Description of Artificial Sequence: Synthetic oligonucleotide
gaagaacatgcccggcttct

SEQ ID NO: 17941-17949 - skipped (9 entries)

SEQ ID NO: 17950 - DNA, 20 bp, Artificial Sequence
  Description of Artificial Sequence: Synthetic oligonucleotide
cggcttcttggtcatcatct

SEQ ID NO: 17951-17959 - skipped (9 entries)

SEQ ID NO: 17960 - DNA, 20 bp, Artificial Sequence
  Description of Artificial Sequence: Synthetic oligonucleotide
ggtcatcatcttggtgtaca

SEQ ID NO: 17961-17969 - skipped (9 entries)

SEQ ID NO: 17970 - DNA, 20 bp, Artificial Sequence
  Description of Artificial Sequence: Synthetic oligonucleotide
cttggtgtacacggcctcgt

SEQ ID NO: 17971-17979 - skipped (9 entries)

SEQ ID NO: 17980 - DNA, 20 bp, Artificial Sequence
  Description of Artificial Sequence: Synthetic oligonucleotide
ttggtgtacacggcctcgtt

SEQ ID NO: 17981-17989 - skipped (9 entries)

SEQ ID NO: 17990 - DNA, 20 bp, Artificial Sequence
  Description of Artificial Sequence: Synthetic oligonucleotide
cggcctcgttgggctgcacg

SEQ ID NO: 17991-17999 - skipped (9 entries)

SEQ ID NO: 18000 - DNA, 20 bp, Artificial Sequence
  Description of Artificial Sequence: Synthetic oligonucleotide
gctcgttgcgcttgcactgc

SEQ ID NO: 18001-18009 - skipped (9 entries)

SEQ ID NO: 18010 - DNA, 20 bp, Artificial Sequence
  Description of Artificial Sequence: Synthetic oligonucleotide
cgttgcgcttgcactgctgg

SEQ ID NO: 18011-18019 - skipped (9 entries)

SEQ ID NO: 18020 - DNA, 20 bp, Artificial Sequence
  Description of Artificial Sequence: Synthetic oligonucleotide
ctgctggtggaagatgtcgc

SEQ ID NO: 18021-18029 - skipped (9 entries)

SEQ ID NO: 18030 - DNA, 20 bp, Artificial Sequence
  Description of Artificial Sequence: Synthetic oligonucleotide
agatgtcgccggccacatca

SEQ ID NO: 18031-18039 - skipped (9 entries)

SEQ ID NO: 18040 - DNA, 20 bp, Artificial Sequence
  Description of Artificial Sequence: Synthetic oligonucleotide
atggaactgcagcctcacct

SEQ ID NO: 18041-18049 - skipped (9 entries)

SEQ ID NO: 18050 - DNA, 20 bp, Artificial Sequence
  Description of Artificial Sequence: Synthetic oligonucleotide
cctcggccttgcgctcgttc

SEQ ID NO: 18051-18059 - skipped (9 entries)

SEQ ID NO: 18060 - DNA, 20 bp, Artificial Sequence
  Description of Artificial Sequence: Synthetic oligonucleotide
ctcggccttgcgctcgttca

SEQ ID NO: 18061-18069 - skipped (9 entries)

SEQ ID NO: 18070 - DNA, 20 bp, Artificial Sequence
  Description of Artificial Sequence: Synthetic oligonucleotide
tcagggccttgccgcagcgc

SEQ ID NO: 18071-18079 - skipped (9 entries)

SEQ ID NO: 18080 - DNA, 20 bp, Artificial Sequence
  Description of Artificial Sequence: Synthetic oligonucleotide
cttgccgcagcgcaggatga

SEQ ID NO: 18081-18089 - skipped (9 entries)

SEQ ID NO: 18090 - DNA, 20 bp, Artificial Sequence
  Description of Artificial Sequence: Synthetic oligonucleotide
ttgccgcagcgcaggatgaa

SEQ ID NO: 18091-18099 - skipped (9 entries)

SEQ ID NO: 18100 - DNA, 20 bp, Artificial Sequence
  Description of Artificial Sequence: Synthetic oligonucleotide
gtatgagggcacctacaagt

SEQ ID NO: 18101-18109 - skipped (9 entries)

SEQ ID NO: 18110 - DNA, 20 bp, Artificial Sequence
  Description of Artificial Sequence: Synthetic oligonucleotide
agtatgagggcacctacaag

SEQ ID NO: 18111-18119 - skipped (9 entries)

SEQ ID NO: 18120 - DNA, 20 bp, Artificial Sequence
  Description of Artificial Sequence: Synthetic oligonucleotide
agagtgggtttccagtatga

SEQ ID NO: 18121-18129 - skipped (9 entries)

SEQ ID NO: 18130 - DNA, 20 bp, Artificial Sequence
  Description of Artificial Sequence: Synthetic oligonucleotide
gagagtgggtttccagtatg

SEQ ID NO: 18131-18139 - skipped (9 entries)

SEQ ID NO: 18140 - DNA, 20 bp, Artificial Sequence
  Description of Artificial Sequence: Synthetic oligonucleotide
gacgagctgatgaagagagt

SEQ ID NO: 18141-18149 - skipped (9 entries)

SEQ ID NO: 18150 - DNA, 20 bp, Artificial Sequence
  Description of Artificial Sequence: Synthetic oligonucleotide
agacgagctgatgaagagag

SEQ ID NO: 18151-18159 - skipped (9 entries)

SEQ ID NO: 18160 - DNA, 20 bp, Artificial Sequence
  Description of Artificial Sequence: Synthetic oligonucleotide
ctccagccgaggccccacgg

SEQ ID NO: 18161-18169 - skipped (9 entries)

SEQ ID NO: 18170 - DNA, 20 bp, Artificial Sequence
  Description of Artificial Sequence: Synthetic oligonucleotide
cacccgtcactctccagccg

SEQ ID NO: 18171-18179 - skipped (9 entries)

SEQ ID NO: 18180 - DNA, 20 bp, Artificial Sequence
  Description of Artificial Sequence: Synthetic oligonucleotide
ccatcccctatatttatggc

SEQ ID NO: 18181-18189 - skipped (9 entries)

SEQ ID NO: 18190 - DNA, 20 bp, Artificial Sequence
  Description of Artificial Sequence: Synthetic oligonucleotide
aagcccatcccctatattta

SEQ ID NO: 18191-18199 - skipped (9 entries)

SEQ ID NO: 18200 - DNA, 20 bp, Artificial Sequence
  Description of Artificial Sequence: Synthetic oligonucleotide
actgctgcaccagattgagc

SEQ ID NO: 18201-18209 - skipped (9 entries)

SEQ ID NO: 18210 - DNA, 20 bp, Artificial Sequence
  Description of Artificial Sequence: Synthetic oligonucleotide
gcgacgagctccgtgaggcc

SEQ ID NO: 18211-18219 - skipped (9 entries)

SEQ ID NO: 18220 - DNA, 20 bp, Artificial Sequence
  Description of Artificial Sequence: Synthetic oligonucleotide
cctcagcgacgagctccgtg

SEQ ID NO: 18221-18229 - skipped (9 entries)

SEQ ID NO: 18230 - DNA, 20 bp, Artificial Sequence
  Description of Artificial Sequence: Synthetic oligonucleotide
gccagatgcacttcgtgcgc

SEQ ID NO: 18231-18239 - skipped (9 entries)

SEQ ID NO: 18240 - DNA, 20 bp, Artificial Sequence
  Description of Artificial Sequence: Synthetic oligonucleotide
tcatcctggacgtcttctgc

SEQ ID NO: 18241-18249 - skipped (9 entries)

SEQ ID NO: 18250 - DNA, 20 bp, Artificial Sequence
  Description of Artificial Sequence: Synthetic oligonucleotide
ctcatcctggacgtcttctg

SEQ ID NO: 18251-18259 - skipped (9 entries)

SEQ ID NO: 18260 - DNA, 20 bp, Artificial Sequence
  Description of Artificial Sequence: Synthetic oligonucleotide
cgcctatgagcgcctcatcc

SEQ ID NO: 18261-18269 - skipped (9 entries)

SEQ ID NO: 18270 - DNA, 20 bp, Artificial Sequence
  Description of Artificial Sequence: Synthetic oligonucleotide
gacctacggcaacagataca

SEQ ID NO: 18271-18279 - skipped (9 entries)

SEQ ID NO: 18280 - DNA, 20 bp, Artificial Sequence
  Description of Artificial Sequence: Synthetic oligonucleotide
tcggagctggacctgaccta

SEQ ID NO: 18281-18289 - skipped (9 entries)

SEQ ID NO: 18290 - DNA, 20 bp, Artificial Sequence
  Description of Artificial Sequence: Synthetic oligonucleotide
caaccccgaggagtcggagc

SEQ ID NO: 18291-18299 - skipped (9 entries)

SEQ ID NO: 18300 - DNA, 20 bp, Artificial Sequence
  Description of Artificial Sequence: Synthetic oligonucleotide
gttcttcaaccccgaggagt

SEQ ID NO: 18301-18309 - skipped (9 entries)

SEQ ID NO: 18310 - DNA, 20 bp, Artificial Sequence
  Description of Artificial Sequence: Synthetic oligonucleotide
gggcatgttcttcaaccccg

SEQ ID NO: 18311-18319 - skipped (9 entries)

SEQ ID NO: 18320 - DNA, 20 bp, Artificial Sequence
  Description of Artificial Sequence: Synthetic oligonucleotide
aagatgatgaccaagaagcc

SEQ ID NO: 18321-18329 - skipped (9 entries)

SEQ ID NO: 18330 - DNA, 20 bp, Artificial Sequence
  Description of Artificial Sequence: Synthetic oligonucleotide
caagatgatgaccaagaagc

SEQ ID NO: 18331-18339 - skipped (9 entries)

SEQ ID NO: 18340 - DNA, 20 bp, Artificial Sequence
  Description of Artificial Sequence: Synthetic oligonucleotide
gatccgcgtgcagcccaacg

SEQ ID NO: 18341-18349 - skipped (9 entries)

SEQ ID NO: 18350 - DNA, 20 bp, Artificial Sequence
  Description of Artificial Sequence: Synthetic oligonucleotide
gcagtgcaagcgcaacgagc

SEQ ID NO: 18351-18359 - skipped (9 entries)

SEQ ID NO: 18360 - DNA, 20 bp, Artificial Sequence
  Description of Artificial Sequence: Synthetic oligonucleotide
ctgcagttccatgatgtggc

SEQ ID NO: 18361-18369 - skipped (9 entries)

SEQ ID NO: 18370 - DNA, 20 bp, Artificial Sequence
  Description of Artificial Sequence: Synthetic oligonucleotide
gaggctgcagttccatgatg

SEQ ID NO: 18371-18379 - skipped (9 entries)

SEQ ID NO: 18380 - DNA, 20 bp, Artificial Sequence
  Description of Artificial Sequence: Synthetic oligonucleotide
acgagcgcaaggccgaggtg

SEQ ID NO: 18381-18389 - skipped (9 entries)

SEQ ID NO: 18390 - DNA, 20 bp, Artificial Sequence
  Description of Artificial Sequence: Synthetic oligonucleotide
cctgaacgagcgcaaggccg

SEQ ID NO: 18391-18399 - skipped (9 entries)

SEQ ID NO: 18400 - DNA, 20 bp, Artificial Sequence
  Description of Artificial Sequence: Synthetic oligonucleotide
caaggccctgaacgagcgca

SEQ ID NO: 18401-18409 - skipped (9 entries)

SEQ ID NO: 18410 - DNA, 20 bp, Artificial Sequence
  Description of Artificial Sequence: Synthetic oligonucleotide
cttcatcctgcgctgcggca

SEQ ID NO: 18411-18419 - skipped (9 entries)

SEQ ID NO: 18420 - DNA, 20 bp, Artificial Sequence
  Description of Artificial Sequence: Synthetic oligonucleotide
gtgcccttcatcctgcgctg

SEQ ID NO: 18421-18429 - skipped (9 entries)

SEQ ID NO: 18430 - DNA, 20 bp, Artificial Sequence
  Description of Artificial Sequence: Synthetic oligonucleotide
agaatgagaggtgggatggt

SEQ ID NO: 18431-18439 - skipped (9 entries)

SEQ ID NO: 18440 - DNA, 20 bp, Artificial Sequence
  Description of Artificial Sequence: Synthetic oligonucleotide
gtggagaatgagaggtggga

SEQ ID NO: 18441-18449 - skipped (9 entries)

SEQ ID NO: 18450 - DNA, 20 bp, Artificial Sequence
  Description of Artificial Sequence: Synthetic oligonucleotide
cttaatgaaaccataaaaat

SEQ ID NO: 18451-18459 - skipped (9 entries)

SEQ ID NO: 18460 - DNA, 20 bp, Artificial Sequence
  Description of Artificial Sequence: Synthetic oligonucleotide
gactaagcttaattgctttc

SEQ ID NO: 18461-18469 - skipped (9 entries)

SEQ ID NO: 18470 - DNA, 20 bp, Artificial Sequence
  Description of Artificial Sequence: Synthetic oligonucleotide
gcttaattgctttctggaac

SEQ ID NO: 18471-18479 - skipped (9 entries)

SEQ ID NO: 18480 - DNA, 20 bp, Artificial Sequence
  Description of Artificial Sequence: Synthetic oligonucleotide
tctggaacaggatctgaaac

SEQ ID NO: 18481-18489 - skipped (9 entries)

SEQ ID NO: 18490 - DNA, 20 bp, Artificial Sequence
  Description of Artificial Sequence: Synthetic oligonucleotide
ctgaaactggatatcccaac

SEQ ID NO: 18491-18499 - skipped (9 entries)

SEQ ID NO: 18500 - DNA, 20 bp, Artificial Sequence
  Description of Artificial Sequence: Synthetic oligonucleotide
ttaaaggtacgacaccacag

SEQ ID NO: 18501-18509 - skipped (9 entries)

SEQ ID NO: 18510 - DNA, 20 bp, Artificial Sequence
  Description of Artificial Sequence: Synthetic oligonucleotide
ttatttatacccatcaacac

SEQ ID NO: 18511-18519 - skipped (9 entries)

SEQ ID NO: 18520 - DNA, 20 bp, Artificial Sequence
  Description of Artificial Sequence: Synthetic oligonucleotide
atctccttgatcagctgaaa

SEQ ID NO: 18521-18529 - skipped (9 entries)

SEQ ID NO: 18530 - DNA, 20 bp, Artificial Sequence
  Description of Artificial Sequence: Synthetic oligonucleotide
caacaaagaagagacaattc

SEQ ID NO: 18531-18539 - skipped (9 entries)

SEQ ID NO: 18540 - DNA, 20 bp, Artificial Sequence
  Description of Artificial Sequence: Synthetic oligonucleotide
ttaggatgtggatgtagaag

SEQ ID NO: 18541-18549 - skipped (9 entries)

SEQ ID NO: 18550 - DNA, 20 bp, Artificial Sequence
  Description of Artificial Sequence: Synthetic oligonucleotide
ggatgtagaagaggcagttc

SEQ ID NO: 18551-18559 - skipped (9 entries)

SEQ ID NO: 18560 - DNA, 20 bp, Artificial Sequence
  Description of Artificial Sequence: Synthetic oligonucleotide
gatgtagaagaggcagttct

SEQ ID NO: 18561-18569 - skipped (9 entries)

SEQ ID NO: 18570 - DNA, 20 bp, Artificial Sequence
  Description of Artificial Sequence: Synthetic oligonucleotide
atgtagaagaggcagttctg

SEQ ID NO: 18571-18579 - skipped (9 entries)

SEQ ID NO: 18580 - DNA, 20 bp, Artificial Sequence
  Description of Artificial Sequence: Synthetic oligonucleotide
caagagccatctgtagatgc

SEQ ID NO: 18581-18589 - skipped (9 entries)

SEQ ID NO: 18590 - DNA, 20 bp, Artificial Sequence
  Description of Artificial Sequence: Synthetic oligonucleotide
gccatctgtagatgctggtg

SEQ ID NO: 18591-18599 - skipped (9 entries)

SEQ ID NO: 18600 - DNA, 20 bp, Artificial Sequence
  Description of Artificial Sequence: Synthetic oligonucleotide
ggtgtggattgttcatcaat

SEQ ID NO: 18601-18609 - skipped (9 entries)

SEQ ID NO: 18610 - DNA, 20 bp, Artificial Sequence
  Description of Artificial Sequence: Synthetic oligonucleotide
gtggattgttcatcaattgg

SEQ ID NO: 18611-18619 - skipped (9 entries)

SEQ ID NO: 18620 - DNA, 20 bp, Artificial Sequence
  Description of Artificial Sequence: Synthetic oligonucleotide
tggattgttcatcaattggc

SEQ ID NO: 18621-18629 - skipped (9 entries)

SEQ ID NO: 18630 - DNA, 20 bp, Artificial Sequence
  Description of Artificial Sequence: Synthetic oligonucleotide
ggattgttcatcaattggcg

SEQ ID NO: 18631-18639 - skipped (9 entries)

SEQ ID NO: 18640 - DNA, 20 bp, Artificial Sequence
  Description of Artificial Sequence: Synthetic oligonucleotide
tggcggggttccatttttcc

SEQ ID NO: 18641-18649 - skipped (9 entries)

SEQ ID NO: 18650 - DNA, 20 bp, Artificial Sequence
  Description of Artificial Sequence: Synthetic oligonucleotide
ccacagcataaaaaatcaca

SEQ ID NO: 18651-18659 - skipped (9 entries)

SEQ ID NO: 18660 - DNA, 20 bp, Artificial Sequence
  Description of Artificial Sequence: Synthetic oligonucleotide
ggaaaagacaaagaaaacag

SEQ ID NO: 18661-18669 - skipped (9 entries)

SEQ ID NO: 18670 - DNA, 20 bp, Artificial Sequence
  Description of Artificial Sequence: Synthetic oligonucleotide
aaacagaggcattaacacac

SEQ ID NO: 18671-18679 - skipped (9 entries)

SEQ ID NO: 18680 - DNA, 20 bp, Artificial Sequence
  Description of Artificial Sequence: Synthetic oligonucleotide
gaggcattaacacactggag

SEQ ID NO: 18681-18689 - skipped (9 entries)

SEQ ID NO: 18690 - DNA, 20 bp, Artificial Sequence
  Description of Artificial Sequence: Synthetic oligonucleotide
cacactggagaggtctaaag

SEQ ID NO: 18691-18699 - skipped (9 entries)

SEQ ID NO: 18700 - DNA, 20 bp, Artificial Sequence
  Description of Artificial Sequence: Synthetic oligonucleotide
ggaagaaactacagagcact

SEQ ID NO: 18701-18709 - skipped (9 entries)

SEQ ID NO: 18710 - DNA, 20 bp, Artificial Sequence
  Description of Artificial Sequence: Synthetic oligonucleotide
cttagtcaaaccaattttta

SEQ ID NO: 18711-18719 - skipped (9 entries)

SEQ ID NO: 18720 - DNA, 20 bp, Artificial Sequence
  Description of Artificial Sequence: Synthetic oligonucleotide
tctcttttaaagtacctgtt

SEQ ID NO: 18721-18729 - skipped (9 entries)

SEQ ID NO: 18730 - DNA, 20 bp, Artificial Sequence
  Description of Artificial Sequence: Synthetic oligonucleotide
ttctcttttaaagtacctgt

SEQ ID NO: 18731-18739 - skipped (9 entries)

SEQ ID NO: 18740 - DNA, 20 bp, Artificial Sequence
  Description of Artificial Sequence: Synthetic oligonucleotide
tataaataacttttcctctg

SEQ ID NO: 18741-18749 - skipped (9 entries)

SEQ ID NO: 18750 - DNA, 20 bp, Artificial Sequence
  Description of Artificial Sequence: Synthetic oligonucleotide
cagttcttaccagtgttgat

SEQ ID NO: 18751-18759 - skipped (9 entries)

SEQ ID NO: 18760 - DNA, 20 bp, Artificial Sequence
  Description of Artificial Sequence: Synthetic oligonucleotide
tcagttcttaccagtgttga

SEQ ID NO: 18761-18769 - skipped (9 entries)

SEQ ID NO: 18770 - DNA, 20 bp, Artificial Sequence
  Description of Artificial Sequence: Synthetic oligonucleotide
tgatcaaggagatgttcacg

SEQ ID NO: 18771-18779 - skipped (9 entries)

SEQ ID NO: 18780 - DNA, 20 bp, Artificial Sequence
  Description of Artificial Sequence: Synthetic oligonucleotide
gtttccttttcagctgatca

SEQ ID NO: 18781-18789 - skipped (9 entries)

SEQ ID NO: 18790 - DNA, 20 bp, Artificial Sequence
  Description of Artificial Sequence: Synthetic oligonucleotide
tttagcatcattaacagctc

SEQ ID NO: 18791-18799 - skipped (9 entries)

SEQ ID NO: 18800 - DNA, 20 bp, Artificial Sequence
  Description of Artificial Sequence: Synthetic oligonucleotide
acagatggctcttgacttag

SEQ ID NO: 18801-18809 - skipped (9 entries)

SEQ ID NO: 18810 - DNA, 20 bp, Artificial Sequence
  Description of Artificial Sequence: Synthetic oligonucleotide
tccacaccagcatctacaga

SEQ ID NO: 18811-18819 - skipped (9 entries)

SEQ ID NO: 18820 - DNA, 20 bp, Artificial Sequence
  Description of Artificial Sequence: Synthetic oligonucleotide
atatgacatacctggaaaaa

SEQ ID NO: 18821-18829 - skipped (9 entries)

SEQ ID NO: 18830 - DNA, 20 bp, Artificial Sequence
  Description of Artificial Sequence: Synthetic oligonucleotide
aggttgatctgggctcgcag

SEQ ID NO: 18831-18839 - skipped (9 entries)

SEQ ID NO: 18840 - DNA, 20 bp, Artificial Sequence
  Description of Artificial Sequence: Synthetic oligonucleotide
agtgaattaaaggttgatct

SEQ ID NO: 18841-18849 - skipped (9 entries)

SEQ ID NO: 18850 - DNA, 20 bp, Artificial Sequence
  Description of Artificial Sequence: Synthetic oligonucleotide
aagtgaattaaaggttgatc

SEQ ID NO: 18851 - DNA, 78 bp, Artificial Sequence
  Description of Artificial Sequence: Synthetic oligonucleotide
tctggcggaggaagcggaggcggaggatctggtggtggtggatctggcggcggtggtagtggcggaggttctctgcaa

SEQ ID NO: 18852 - DNA, 20 bp, Artificial Sequence
  Description of Artificial Sequence: Synthetic oligonucleotide
caggacgatgtgcagcggcc

SEQ ID NO: 18853 - DNA, 20 bp, Artificial Sequence
  Description of Artificial Sequence: Synthetic oligonucleotide
accgcacgttcagaagtcgg

SEQ ID NO: 18854 - DNA, 20 bp, Artificial Sequence
  Description of Artificial Sequence: Synthetic oligonucleotide
acaactgtgtaaattttgtg

SEQ ID NO: 18855 - DNA, 20 bp, Artificial Sequence
  Description of Artificial Sequence: Synthetic oligonucleotide
caactgtgtaaattttgtga

SEQ ID NO: 18856 - DNA, 20 bp, Artificial Sequence
  Description of Artificial Sequence: Synthetic oligonucleotide
acctgtgacaaccagaaatc

SEQ ID NO: 18857 - DNA, 20 bp, Artificial Sequence
  Description of Artificial Sequence: Synthetic oligonucleotide
cctgtgacaaccagaaatcc

SEQ ID NO: 18858 - DNA, 20 bp, Artificial Sequence
  Description of Artificial Sequence: Synthetic oligonucleotide
tgtggcttctcacagatgga

SEQ ID NO: 18859 - DNA, 20 bp, Artificial Sequence
  Description of Artificial Sequence: Synthetic oligonucleotide
tctgtgagaagccacaggaa

SEQ ID NO: 18860 - DNA, 20 bp, Artificial Sequence
  Description of Artificial Sequence: Synthetic oligonucleotide
aagctcccctaccatgactt

SEQ ID NO: 18861 - DNA, 20 bp, Artificial Sequence
  Description of Artificial Sequence: Synthetic oligonucleotide
gaataaagtcatggtagggg

SEQ ID NO: 18862 - DNA, 20 bp, Artificial Sequence
  Description of Artificial Sequence: Synthetic oligonucleotide
agaataaagtcatggtaggg

SEQ ID NO: 18863 - DNA, 20 bp, Artificial Sequence
  Description of Artificial Sequence: Synthetic oligonucleotide
ctaccatgactttattctgg

SEQ ID NO: 18864 - DNA, 20 bp, Artificial Sequence
  Description of Artificial Sequence: Synthetic oligonucleotide
taccatgactttattctgga

SEQ ID NO: 18865 - DNA, 20 bp, Artificial Sequence
  Description of Artificial Sequence: Synthetic oligonucleotide
taatgcactttggagaagca

SEQ ID NO: 18866 - DNA, 20 bp, Artificial Sequence
  Description of Artificial Sequence: Synthetic oligonucleotide
ttcataatgcactttggaga

SEQ ID NO: 18867 - DNA, 20 bp, Artificial Sequence
  Description of Artificial Sequence: Synthetic oligonucleotide
aagtgcattatgaaggaaaa

SEQ ID NO: 18868 - DNA, 20 bp, Artificial Sequence
  Description of Artificial Sequence: Synthetic oligonucleotide
tgtgttcctgtagctctgat

SEQ ID NO: 18869 - DNA, 20 bp, Artificial Sequence
  Description of Artificial Sequence: Synthetic oligonucleotide
tgtagctctgatgagtgcaa

SEQ ID NO: 18870 - DNA, 20 bp, Artificial Sequence
  Description of Artificial Sequence: Synthetic oligonucleotide
agtgacaggcatcagcctcc

SEQ ID NO: 18871 - DNA, 20 bp, Artificial Sequence
  Description of Artificial Sequence: Synthetic oligonucleotide
agtggtggcaggaggctgat

SEQ ID NO: 18872 - DNA, 20 bp, Artificial Sequence
  Description of Artificial Sequence: Synthetic oligonucleotide
aggttgaactcagcttctgc

SEQ ID NO: 18873 - DNA, 20 bp, Artificial Sequence
  Description of Artificial Sequence: Synthetic oligonucleotide
caggttgaactcagcttctg

SEQ ID NO: 18874 - DNA, 20 bp, Artificial Sequence
  Description of Artificial Sequence: Synthetic oligonucleotide
acctgggaaaccggcaagac

SEQ ID NO: 18875 - DNA, 20 bp, Artificial Sequence
  Description of Artificial Sequence: Synthetic oligonucleotide
cgtcttgccggtttcccagg

SEQ ID NO: 18876 - DNA, 20 bp, Artificial Sequence
  Description of Artificial Sequence: Synthetic oligonucleotide
gcgtcttgccggtttcccag

SEQ ID NO: 18877 - DNA, 20 bp, Artificial Sequence
  Description of Artificial Sequence: Synthetic oligonucleotide
tgagcttccgcgtcttgccg

SEQ ID NO: 18878 - DNA, 20 bp, Artificial Sequence
  Description of Artificial Sequence: Synthetic oligonucleotide
gcgagcactgtgccatcatc

SEQ ID NO: 18879 - DNA, 20 bp, Artificial Sequence
  Description of Artificial Sequence: Synthetic oligonucleotide
ggatgatggcacagtgctcg

SEQ ID NO: 18880 - DNA, 20 bp, Artificial Sequence
  Description of Artificial Sequence: Synthetic oligonucleotide
aggatgatggcacagtgctc

SEQ ID NO: 18881 - DNA, 20 bp, Artificial Sequence
  Description of Artificial Sequence: Synthetic oligonucleotide
cgtgtgccaacaacatcaac

SEQ ID NO: 18882 - DNA, 20 bp, Artificial Sequence
  Description of Artificial Sequence: Synthetic oligonucleotide
gctcaatgggcagcagctct

SEQ ID NO: 18883 - DNA, 20 bp, Artificial Sequence
  Description of Artificial Sequence: Synthetic oligonucleotide
accagggtgtccagctcaat

SEQ ID NO: 18884 - DNA, 20 bp, Artificial Sequence
  Description of Artificial Sequence: Synthetic oligonucleotide
caccagggtgtccagctcaa

SEQ ID NO: 18885 - DNA, 20 bp, Artificial Sequence
  Description of Artificial Sequence: Synthetic oligonucleotide
ccaccagggtgtccagctca

SEQ ID NO: 18886 - DNA, 20 bp, Artificial Sequence
  Description of Artificial Sequence: Synthetic oligonucleotide
gcttggccttatagacctca

SEQ ID NO: 18887 - DNA, 20 bp, Artificial Sequence
  Description of Artificial Sequence: Synthetic oligonucleotide
gagcagtttgagacagtggc

SEQ ID NO: 18888 - DNA, 20 bp, Artificial Sequence
  Description of Artificial Sequence: Synthetic oligonucleotide
agaggcatactcctcatagg

SEQ ID NO: 18889 - DNA, 20 bp, Artificial Sequence
  Description of Artificial Sequence: Synthetic oligonucleotide
ctatgaggagtatgcctctt

SEQ ID NO: 18890 - DNA, 20 bp, Artificial Sequence
  Description of Artificial Sequence: Synthetic oligonucleotide
aagaggcatactcctcatag

SEQ ID NO: 18891 - DNA, 20 bp, Artificial Sequence
  Description of Artificial Sequence: Synthetic oligonucleotide
tatgaggagtatgcctcttg

SEQ ID NO: 18892 - DNA, 20 bp, Artificial Sequence
  Description of Artificial Sequence: Synthetic oligonucleotide
gattgatgtctgagaagatg

SEQ ID NO: 18893 - DNA, 20 bp, Artificial Sequence
  Description of Artificial Sequence: Synthetic oligonucleotide
ctcctcagccgtcaggaact

SEQ ID NO: 18894 - DNA, 20 bp, Artificial Sequence
  Description of Artificial Sequence: Synthetic oligonucleotide
gttcctgacggctgaggagc

SEQ ID NO: 18895 - DNA, 20 bp, Artificial Sequence
  Description of Artificial Sequence: Synthetic oligonucleotide
gctcctcagccgtcaggaac

SEQ ID NO: 18896 - DNA, 20 bp, Artificial Sequence
  Description of Artificial Sequence: Synthetic oligonucleotide
tgacggctgaggagcggaag

SEQ ID NO: 18897 - DNA, 20 bp, Artificial Sequence
  Description of Artificial Sequence: Synthetic oligonucleotide
tcttccgctcctcagccgtc

SEQ ID NO: 18898 - DNA, 20 bp, Artificial Sequence
  Description of Artificial Sequence: Synthetic oligonucleotide
aactccgtcttccgctcctc

SEQ ID NO: 18899 - DNA, 20 bp, Artificial Sequence
  Description of Artificial Sequence: Synthetic oligonucleotide
caactccgtcttccgctcct

SEQ ID NO: 18900 - DNA, 20 bp, Artificial Sequence
  Description of Artificial Sequence: Synthetic oligonucleotide
ccaactccgtcttccgctcc

SEQ ID NO: 18901 - DNA, 20 bp, Artificial Sequence
  Description of Artificial Sequence: Synthetic oligonucleotide
acgccaagggcaacctacag

SEQ ID NO: 18902 - DNA, 20 bp, Artificial Sequence
  Description of Artificial Sequence: Synthetic oligonucleotide
cgccaagggcaacctacagg

SEQ ID NO: 18903 - DNA, 20 bp, Artificial Sequence
  Description of Artificial Sequence: Synthetic oligonucleotide
agctgatgacatgccgcgtc

SEQ ID NO: 18904 - DNA, 20 bp, Artificial Sequence
  Description of Artificial Sequence: Synthetic oligonucleotide
gggcgagggagctgcccagc

SEQ ID NO: 18905 - DNA, 20 bp, Artificial Sequence
  Description of Artificial Sequence: Synthetic oligonucleotide
cgggcgagggagctgcccag

SEQ ID NO: 18906 - DNA, 20 bp, Artificial Sequence
  Description of Artificial Sequence: Synthetic oligonucleotide
ccgggcgagggagctgccca

SEQ ID NO: 18907 - DNA, 20 bp, Artificial Sequence
  Description of Artificial Sequence: Synthetic oligonucleotide
tcgcccgggggattgctcac

SEQ ID NO: 18908 - DNA, 20 bp, Artificial Sequence
  Description of Artificial Sequence: Synthetic oligonucleotide
acatggagtgtgatcactgt

SEQ ID NO: 18909 - DNA, 20 bp, Artificial Sequence
  Description of Artificial Sequence: Synthetic oligonucleotide
cagtgatcacactccatgtg

SEQ ID NO: 18910 - DNA, 20 bp, Artificial Sequence
  Description of Artificial Sequence: Synthetic oligonucleotide
tgtgggaggcccaagatgcc

SEQ ID NO: 18911 - DNA, 20 bp, Artificial Sequence
  Description of Artificial Sequence: Synthetic oligonucleotide
tgtgcacgatgggcatcttg

SEQ ID NO: 18912 - DNA, 20 bp, Artificial Sequence
  Description of Artificial Sequence: Synthetic oligonucleotide
cgaggatattggagctcttg

SEQ ID NO: 18913 - DNA, 20 bp, Artificial Sequence
  Description of Artificial Sequence: Synthetic oligonucleotide
atatcctcgtgaagaacgac

SEQ ID NO: 18914 - DNA, 20 bp, Artificial Sequence
  Description of Artificial Sequence: Synthetic oligonucleotide
gacgcagggaaagcccaaag

SEQ ID NO: 18915 - DNA, 20 bp, Artificial Sequence
  Description of Artificial Sequence: Synthetic oligonucleotide
ctgcgtctggaccctactct

SEQ ID NO: 18916 - DNA, 20 bp, Artificial Sequence
  Description of Artificial Sequence: Synthetic oligonucleotide
tgcgtctggaccctactctg

SEQ ID NO: 18917 - DNA, 20 bp, Artificial Sequence
  Description of Artificial Sequence: Synthetic oligonucleotide
cagacagagtagggtccaga

SEQ ID NO: 18918 - DNA, 20 bp, Artificial Sequence
  Description of Artificial Sequence: Synthetic oligonucleotide
gccagcacgatcccaccgca

SEQ ID NO: 18919 - DNA, 20 bp, Artificial Sequence
  Description of Artificial Sequence: Synthetic oligonucleotide
aaggaaaaaaaaaagcctgg

SEQ ID NO: 18920 - DNA, 20 bp, Artificial Sequence
  Description of Artificial Sequence: Synthetic oligonucleotide
acaccagcaatcctgacttg

SEQ ID NO: 18921 - DNA, 20 bp, Artificial Sequence
  Description of Artificial Sequence: Synthetic oligonucleotide
actagcaacaagtcaggatt

SEQ ID NO: 18922 - DNA, 20 bp, Artificial Sequence
  Description of Artificial Sequence: Synthetic oligonucleotide
gcaactcccagtggtggcag

SEQ ID NO: 18923 - DNA, 20 bp, Artificial Sequence
  Description of Artificial Sequence: Synthetic oligonucleotide
tgtcatcatcatcttctact

SEQ ID NO: 18924 - DNA, 20 bp, Artificial Sequence
  Description of Artificial Sequence: Synthetic oligonucleotide
gacctcagcaaagcgacctt

SEQ ID NO: 18925 - DNA, 20 bp, Artificial Sequence
  Description of Artificial Sequence: Synthetic oligonucleotide
aggccaagctgaagcagaac

SEQ ID NO: 18926 - DNA, 20 bp, Artificial Sequence
  Description of Artificial Sequence: Synthetic oligonucleotide
aggagtatgcctcttggaag

SEQ ID NO: 18927 - DNA, 20 bp, Artificial Sequence
  Description of Artificial Sequence: Synthetic oligonucleotide
cctcttggaagacagagaag

SEQ ID NO: 18928 - DNA, 20 bp, Artificial Sequence
  Description of Artificial Sequence: Synthetic oligonucleotide
ttctcatgcttcagattgat

SEQ ID NO: 18929 - DNA, 20 bp, Artificial Sequence
  Description of Artificial Sequence: Synthetic oligonucleotide
ctcgtgaagaacgacctaac

SEQ ID NO: 18930 - DNA, 20 bp, Artificial Sequence
  Description of Artificial Sequence: Synthetic oligonucleotide
ggccgctgcacatcgtcctg

SEQ ID NO: 18931 - DNA, 20 bp, Artificial Sequence
  Description of Artificial Sequence: Synthetic oligonucleotide
gcggggtctgccatgggtcg

SEQ ID NO: 18932 - DNA, 20 bp, Artificial Sequence
  Description of Artificial Sequence: Synthetic oligonucleotide
agttgctcatgcaggatttc

SEQ ID NO: 18933 - DNA, 20 bp, Artificial Sequence
  Description of Artificial Sequence: Synthetic oligonucleotide
ccagaataaagtcatggtag

SEQ ID NO: 18934 - DNA, 20 bp, Artificial Sequence
  Description of Artificial Sequence: Synthetic oligonucleotide
cccctaccatgactttattc

SEQ ID NO: 18935 - DNA, 20 bp, Artificial Sequence
  Description of Artificial Sequence: Synthetic oligonucleotide
aagtcatggtaggggagctt

SEQ ID NO: 18936 - DNA, 20 bp, Artificial Sequence
  Description of Artificial Sequence: Synthetic oligonucleotide
agtcatggtaggggagcttg

SEQ ID NO: 18937 - DNA, 20 bp, Artificial Sequence
  Description of Artificial Sequence: Synthetic oligonucleotide
attgcactcatcagagctac

SEQ ID NO: 18938 - DNA, 20 bp, Artificial Sequence
  Description of Artificial Sequence: Synthetic oligonucleotide
cctagagtgaagagattcat

SEQ ID NO: 18939 - DNA, 20 bp, Artificial Sequence
  Description of Artificial Sequence: Synthetic oligonucleotide
ccaatgaatctcttcactct

SEQ ID NO: 18940 - DNA, 20 bp, Artificial Sequence
  Description of Artificial Sequence: Synthetic oligonucleotide
aaagtcatggtaggggagct

SEQ ID NO: 18941 - DNA, 20 bp, Artificial Sequence
  Description of Artificial Sequence: Synthetic oligonucleotide
gtgagcaatcccccgggcga

SEQ ID NO: 18942 - DNA, 20 bp, Artificial Sequence
  Description of Artificial Sequence: Synthetic oligonucleotide
gtcgttcttcacgaggatat

SEQ ID NO: 18943 - DNA, 20 bp, Artificial Sequence
  Description of Artificial Sequence: Synthetic oligonucleotide
gccgcgtcaggtactcctgt

SEQ ID NO: 18944 - DNA, 20 bp, Artificial Sequence
  Description of Artificial Sequence: Synthetic oligonucleotide
gacgcggcatgtcatcagct

SEQ ID NO: 18945 - DNA, 20 bp, Artificial Sequence
  Description of Artificial Sequence: Synthetic oligonucleotide
gcttctgctgccggttaacg

SEQ ID NO: 18946 - DNA, 20 bp, Artificial Sequence
  Description of Artificial Sequence: Synthetic oligonucleotide
gtggatgacctggctaacag

SEQ ID NO: 18947 - DNA, 20 bp, Artificial Sequence
  Description of Artificial Sequence: Synthetic oligonucleotide
gtgatcacactccatgtggg

SEQ ID NO: 18948 - DNA, 20 bp, Artificial Sequence
  Description of Artificial Sequence: Synthetic oligonucleotide
gcccattgagctggacaccc

SEQ ID NO: 18949 - DNA, 20 bp, Artificial Sequence
  Description of Artificial Sequence: Synthetic oligonucleotide
gcggtcatcttccaggatga

SEQ ID NO: 18950 - DNA, 20 bp, Artificial Sequence
  Description of Artificial Sequence: Synthetic oligonucleotide
gggagctgcccagcttgcgc

SEQ ID NO: 18951 - DNA, 20 bp, Artificial Sequence
  Description of Artificial Sequence: Synthetic oligonucleotide
gttgatgttgttggcacacg

SEQ ID NO: 18952 - DNA, 20 bp, Artificial Sequence
  Description of Artificial Sequence: Synthetic oligonucleotide
ggcatcttgggcctcccaca

SEQ ID NO: 18953 - DNA, 20 bp, Artificial Sequence
  Description of Artificial Sequence: Synthetic oligonucleotide
gcggcatgtcatcagctggg

SEQ ID NO: 18954 - DNA, 20 bp, Artificial Sequence
  Description of Artificial Sequence: Synthetic oligonucleotide
gctcctcagccgtcaggaac

SEQ ID NO: 18955 - DNA, 20 bp, Artificial Sequence
  Description of Artificial Sequence: Synthetic oligonucleotide
cagcggggtctgccatgggt

SEQ ID NO: 18956 - DNA, 20 bp, Artificial Sequence
  Description of Artificial Sequence: Synthetic oligonucleotide
atgggtcgggggctgctcag

SEQ ID NO: 18957 - DNA, 20 bp, Artificial Sequence
  Description of Artificial Sequence: Synthetic oligonucleotide
cggggtctgccatgggtcgg

SEQ ID NO: 18958 - DNA, 20 bp, Artificial Sequence
  Description of Artificial Sequence: Synthetic oligonucleotide
aggaagtctgtgtggctgta

SEQ ID NO: 18959 - DNA, 20 bp, Artificial Sequence
  Description of Artificial Sequence: Synthetic oligonucleotide
ctccatctgtgagaagccac

SEQ ID NO: 18960 - DNA, 20 bp, Artificial Sequence
  Description of Artificial Sequence: Synthetic oligonucleotide
atgatagtcactgacaacaa

SEQ ID NO: 18961 - DNA, 20 bp, Artificial Sequence
  Description of Artificial Sequence: Synthetic oligonucleotide
gatgctgcagttgctcatgc

SEQ ID NO: 18962 - DNA, 20 bp, Artificial Sequence
  Description of Artificial Sequence: Synthetic oligonucleotide
acagccacacagacttcctg

SEQ ID NO: 18963 - DNA, 20 bp, Artificial Sequence
  Description of Artificial Sequence: Synthetic oligonucleotide
gaagccacaggaagtctgtg

SEQ ID NO: 18964 - DNA, 20 bp, Artificial Sequence
  Description of Artificial Sequence: Synthetic oligonucleotide
ttcctgtggcttctcacaga

SEQ ID NO: 18965 - DNA, 20 bp, Artificial Sequence
  Description of Artificial Sequence: Synthetic oligonucleotide
ctgtggcttctcacagatgg

SEQ ID NO: 18966 - DNA, 20 bp, Artificial Sequence
  Description of Artificial Sequence: Synthetic oligonucleotide
tcacaaaatttacacagttg

SEQ ID NO: 18967 - DNA, 20 bp, Artificial Sequence
  Description of Artificial Sequence: Synthetic oligonucleotide
tccagaataaagtcatggta

SEQ ID NO: 18968 - DNA, 20 bp, Artificial Sequence
  Description of Artificial Sequence: Synthetic oligonucleotide
ggtaggggagcttggggtca

SEQ ID NO: 18969 - DNA, 20 bp, Artificial Sequence
  Description of Artificial Sequence: Synthetic oligonucleotide
ttctccaaagtgcattatga

SEQ ID NO: 18970 - DNA, 20 bp, Artificial Sequence
  Description of Artificial Sequence: Synthetic oligonucleotide
catcttccagaataaagtca

SEQ ID NO: 18971 - DNA, 20 bp, Artificial Sequence
  Description of Artificial Sequence: Synthetic oligonucleotide
cacatgaagaaagtctcacc

SEQ ID NO: 18972 - DNA, 20 bp, Artificial Sequence
  Description of Artificial Sequence: Synthetic oligonucleotide
ttccagaataaagtcatggt

SEQ ID NO: 18973 - DNA, 20 bp, Artificial Sequence
  Description of Artificial Sequence: Synthetic oligonucleotide
ttttccttcataatgcactt

SEQ ID NO: 18974 - DNA, 20 bp, Artificial Sequence
  Description of Artificial Sequence: Synthetic oligonucleotide
cacagttgtggaaacttgac

SEQ ID NO: 18975 - DNA, 20 bp, Artificial Sequence
  Description of Artificial Sequence: Synthetic oligonucleotide
cccaactccgtcttccgctc

SEQ ID NO: 18976 - DNA, 20 bp, Artificial Sequence
  Description of Artificial Sequence: Synthetic oligonucleotide
ggctttccctgcgtctggac

SEQ ID NO: 18977 - DNA, 20 bp, Artificial Sequence
  Description of Artificial Sequence: Synthetic oligonucleotide
ctgaggtctataaggccaag

SEQ ID NO: 18978 - DNA, 20 bp, Artificial Sequence
  Description of Artificial Sequence: Synthetic oligonucleotide
tgatgtgagattttccacct

SEQ ID NO: 18979 - DNA, 20 bp, Artificial Sequence
  Description of Artificial Sequence: Synthetic oligonucleotide
cctatgaggagtatgcctct

SEQ ID NO: 18980 - DNA, 20 bp, Artificial Sequence
  Description of Artificial Sequence: Synthetic oligonucleotide
aagtgacaggcatcagcctc

SEQ ID NO: 18981 - DNA, 20 bp, Artificial Sequence
  Description of Artificial Sequence: Synthetic oligonucleotide
ccatgaccccaagctcccct

SEQ ID NO: 18982 - DNA, 20 bp, Artificial Sequence
  Description of Artificial Sequence: Synthetic oligonucleotide
cttcataatgcactttggag

SEQ ID NO: 18983 - DNA, 20 bp, Artificial Sequence
  Description of Artificial Sequence: Synthetic oligonucleotide
ttcatgtgttcctgtagctc

SEQ ID NO: 18984 - DNA, 20 bp, Artificial Sequence
  Description of Artificial Sequence: Synthetic oligonucleotide
ttctggaagatgctgcttct

SEQ ID NO: 18985 - DNA, 20 bp, Artificial Sequence
  Description of Artificial Sequence: Synthetic oligonucleotide
cccaccagggtgtccagctc

SEQ ID NO: 18986 - DNA, 20 bp, Artificial Sequence
  Description of Artificial Sequence: Synthetic oligonucleotide
agacagtggcagtcaagatc

SEQ ID NO: 18987 - DNA, 20 bp, Artificial Sequence
  Description of Artificial Sequence: Synthetic oligonucleotide
cctgcgtctggaccctactc

SEQ ID NO: 18988 - DNA, 20 bp, Artificial Sequence
  Description of Artificial Sequence: Synthetic oligonucleotide
cacaactgtgtaaattttgt

SEQ ID NO: 18989 - DNA, 20 bp, Artificial Sequence
  Description of Artificial Sequence: Synthetic oligonucleotide
gagaagcagcatcttccaga

SEQ ID NO: 18990 - DNA, 20 bp, Artificial Sequence
  Description of Artificial Sequence: Synthetic oligonucleotide
tggttgtcacaggtggaaaa

SEQ ID NO: 18991 - DNA, 20 bp, Artificial Sequence
  Description of Artificial Sequence: Synthetic oligonucleotide
ccaggttgaactcagcttct

SEQ ID NO: 18992 - DNA, 21 bp, Artificial Sequence
  Description of Artificial Sequence: Synthetic oligonucleotide
atcacaaaatttacacagttg

SEQ ID NO: 18993 - DNA, 21 bp, Artificial Sequence
  Description of Artificial Sequence: Synthetic oligonucleotide
ggcatcagcctcctgccacca

SEQ ID NO: 18994 - DNA, 21 bp, Artificial Sequence
  Description of Artificial Sequence: Synthetic oligonucleotide
gttagccaggtcatccacaga

SEQ ID NO: 18995 - DNA, 21 bp, Artificial Sequence
  Description of Artificial Sequence: Synthetic oligonucleotide
gctgggcagctccctcgcccg

SEQ ID NO: 18996 - DNA, 21 bp, Artificial Sequence
  Description of Artificial Sequence: Synthetic oligonucleotide
caggaggctgatgcctgtcac

SEQ ID NO: 18997 - DNA, 21 bp, Artificial Sequence
  Description of Artificial Sequence: Synthetic oligonucleotide
gaggagcggaagacggagttg

SEQ ID NO: 18998 - DNA, 21 bp, Artificial Sequence
  Description of Artificial Sequence: Synthetic oligonucleotide
cgtctggaccctactctgtct

SEQ ID NO: 18999 - DNA, 21 bp, Artificial Sequence
  Description of Artificial Sequence: Synthetic oligonucleotide
tttttccttcataatgcactt

SEQ ID NO: 19000 - DNA, 21 bp, Artificial Sequence
  Description of Artificial Sequence: Synthetic oligonucleotide
ccattgagctggacaccctgg

SEQ ID NO: 19001 - DNA, 21 bp, Artificial Sequence
  Description of Artificial Sequence: Synthetic oligonucleotide
cttctccaaagtgcattatga

SEQ ID NO: 19002 - DNA, 21 bp, Artificial Sequence
  Description of Artificial Sequence: Synthetic oligonucleotide
gcccaagatgcccatcgtgca

SEQ ID NO: 19003 - DNA, 21 bp, Artificial Sequence
  Description of Artificial Sequence: Synthetic oligonucleotide
tcatgtgttcctgtagctctg

SEQ ID NO: 19004 - DNA, 21 bp, Artificial Sequence
  Description of Artificial Sequence: Synthetic oligonucleotide
gtgatgctgcagttgctcatg

SEQ ID NO: 19005 - DNA, 21 bp, Artificial Sequence
  Description of Artificial Sequence: Synthetic oligonucleotide
tctcatgcttcagattgatgt

SEQ ID NO: 19006 - DNA, 21 bp, Artificial Sequence
  Description of Artificial Sequence: Synthetic oligonucleotide
tccctatgaggagtatgcctc

SEQ ID NO: 19007 - DNA, 21 bp, Artificial Sequence
  Description of Artificial Sequence: Synthetic oligonucleotide
catcacaaaatttacacagtt

SEQ ID NO: 19008 - DNA, 21 bp, Artificial Sequence
  Description of Artificial Sequence: Synthetic oligonucleotide
attgagctggacaccctggtg

SEQ ID NO: 19009 - DNA, 21 bp, Artificial Sequence
  Description of Artificial Sequence: Synthetic oligonucleotide
cagtcaagatctttccctatg

SEQ ID NO: 19010 - DNA, 21 bp, Artificial Sequence
  Description of Artificial Sequence: Synthetic oligonucleotide
aggatttctggttgtcacagg

SEQ ID NO: 19011 - DNA, 21 bp, Artificial Sequence
  Description of Artificial Sequence: Synthetic oligonucleotide
tccacagtgatcacactccat

SEQ ID NO: 19012 - DNA, 21 bp, Artificial Sequence
  Description of Artificial Sequence: Synthetic oligonucleotide
agcagaacacttcagagcagt

SEQ ID NO: 19013 - DNA, 21 bp, Artificial Sequence
  Description of Artificial Sequence: Synthetic oligonucleotide
ccggcaagacgcggaagctca

SEQ ID NO: 19014 - DNA, 21 bp, Artificial Sequence
  Description of Artificial Sequence: Synthetic oligonucleotide
gatgtcagagcggtcatcttc

SEQ ID NO: 19015 - DNA, 21 bp, Artificial Sequence
  Description of Artificial Sequence: Synthetic oligonucleotide
tcattgcactcatcagagcta

SEQ ID NO: 19016 - DNA, 21 bp, Artificial Sequence
  Description of Artificial Sequence: Synthetic oligonucleotide
cttccagaataaagtcatggt

SEQ ID NO: 19017 - DNA, 21 bp, Artificial Sequence
  Description of Artificial Sequence: Synthetic oligonucleotide
agattttccacctgtgacaac

SEQ ID NO: 19018 - DNA, 21 bp, Artificial Sequence
  Description of Artificial Sequence: Synthetic oligonucleotide
actgcagcatcacctccatct

SEQ ID NO: 19019 - DNA, 21 bp, Artificial Sequence
  Description of Artificial Sequence: Synthetic oligonucleotide
agctgggcagctccctcgccc

SEQ ID NO: 19020 - DNA, 21 bp, Artificial Sequence
  Description of Artificial Sequence: Synthetic oligonucleotide
tgacggctgaggagcggaaga

SEQ ID NO: 19021 - DNA, 21 bp, Artificial Sequence
  Description of Artificial Sequence: Synthetic oligonucleotide
cattgagctggacaccctggt

SEQ ID NO: 19022 - DNA, 21 bp, Artificial Sequence
  Description of Artificial Sequence: Synthetic oligonucleotide
agcaaagcgacctttccccac

SEQ ID NO: 19023 - DNA, 21 bp, Artificial Sequence
  Description of Artificial Sequence: Synthetic oligonucleotide
cgcgttaaccggcagcagaag

SEQ ID NO: 19024 - DNA, 21 bp, Artificial Sequence
  Description of Artificial Sequence: Synthetic oligonucleotide
gaaatatgactagcaacaagt

SEQ ID NO: 19025 - DNA, 21 bp, Artificial Sequence
  Description of Artificial Sequence: Synthetic oligonucleotide
agacagagtagggtccagacg

SEQ ID NO: 19026 - DNA, 21 bp, Artificial Sequence
  Description of Artificial Sequence: Synthetic oligonucleotide
caggatttctggttgtcacag

SEQ ID NO: 19027 - DNA, 21 bp, Artificial Sequence
  Description of Artificial Sequence: Synthetic oligonucleotide
ctcctgtaggttgcccttggc

SEQ ID NO: 19028 - DNA, 21 bp, Artificial Sequence
  Description of Artificial Sequence: Synthetic oligonucleotide
acagagtagggtccagacgca

SEQ ID NO: 19029 - DNA, 21 bp, Artificial Sequence
  Description of Artificial Sequence: Synthetic oligonucleotide
gcttctccaaagtgcattatg

SEQ ID NO: 19030 - DNA, 21 bp, Artificial Sequence
  Description of Artificial Sequence: Synthetic oligonucleotide
gcagcagaagctgagttcaac

SEQ ID NO: 19031 - RNA, 5000 nt, Artificial Sequence
  Description of Artificial Sequence: Synthetic polynucleotide
  misc_feature (1)..(5000): This sequence may encompass 50, 60, 70, 100, 200, 500, 1000, 2000, 3000, 4000, or 5000 nucleotides
aaaaaaaaaaaaaaaaaaaaaaaaaaaaaaaaaaaaaaaaaaaaaaaaaaaaaaaaaaaaaaaaaaaaaaaaaaaaaaaaaaaaaaaaaaaaaaaaaaaaaaaaaaaaaaaaaaaaaaaaaaaaaaaaaaaaaaaaaaaaaaaaaaaaaaaaaaaaaaaaaaaaaaaaaaaaaaaaaaaaaaaaaaaaaaaaaaaaaaaaaaaaaaaaaaaaaaaaaaaaaaaaaaaaaaaaaaaaaaaaaaaaaaaaaaaaaaaaaaaaaaaaaaaaaaaaaaaaaaaaaaaaaaaaaaaaaaaaaaaaaaaaaaaaaaaaaaaaaaaaaaaaaaaaaaaaaaaaaaaaaaaaaaaaaaaaaaaaaaaaaaaaaaaaaaaaaaaaaaaaaaaaaaaaaaaaaaaaaaaaaaaaaaaaaaaaaaaaaaaaaaaaaaaaaaaaaaaaaaaaaaaaaaaaaaaaaaaaaaaaaaaaaaaaaaaaaaaaaaaaaaaaaaaaaaaaaaaaaaaaaaaaaaaaaaaaaaaaaaaaaaaaaaaaaaaaaaaaaaaaaaaaaaaaaaaaaaaaaaaaaaaaaaaaaaaaaaaaaaaaaaaaaaaaaaaaaaaaaaaaaaaaaaaaaaaaaaaaaaaaaaaaaaaaaaaaaaaaaaaaaaaaaaaaaaaaaaaaaaaaaaaaaaaaaaaaaaaaaaaaaaaaaaaaaaaaaaaaaaaaaaaaaaaaaaaaaaaaaaaaaaaaaaaaaaaaaaaaaaaaaaaaaaaaaaaaaaaaaaaaaaaaaaaaaaaaaaaaaaaaaaaaaaaaaaaaaaaaaaaaaaaaaaaaaaaaaaaaaaaaaaaaaaaaaaaaaaaaaaaaaaaaaaaaaaaaaaaaaaaaaaaaaaaaaaaaaaaaaaaaaaaaaaaaaaaaaaaaaaaaaaaaaaaaaaaaaaaaaaaaaaaaaaaaaaaaaaaaaaaaaaaaaaaaaaaaaaaaaaaaaaaaaaaaaaaaaaaaaaaaaaaaaaaaaaaaaaaaaaaaaaaaaaaaaaaaaaaaaaaaaaaaaaaaaaaaaaaaaaaaaaaaaaaaaaaaaaaaaaaaaaaaaaaaaaaaaaaaaaaaaaaaaaaaaaaaaaaaaaaaaaaaaaaaaaaaaaaaaaaaaaaaaaaaaaaaaaaaaaaaaaaaaaaaaaaaaaaaaaaaaaaaaaaaaaaaaaaaaaaaaaaaaaaaaaaaaaaaaaaaaaaaaaaaaaaaaaaaaaaaaaaaaaaaaaaaaaaaaaaaaaaaaaaaaaaaaaaaaaaaaaaaaaaaaaaaaaaaaaaaaaaaaaaaaaaaaaaaaaaaaaaaaaaaaaaaaaaaaaaaaaaaaaaaaaaaaaaaaaaaaaaaaaaaaaaaaaaaaaaaaaaaaaaaaaaaaaaaaaaaaaaaaaaaaaaaaaaaaaaaaaaaaaaaaaaaaaaaaaaaaaaaaaaaaaaaaaaaaaaaaaaaaaaaaaaaaaaaaaaaaaaaaaaaaaaaaaaaaaaaaaaaaaaaaaaaaaaaaaaaaaaaaaaaaaaaaaaaaaaaaaaaaaaaaaaaaaaaaaaaaaaaaaaaaaaaaaaaaaaaaaaaaaaaaaaaaaaaaaaaaaaaaaaaaaaaaaaaaaaaaaaaaaaaaaaaaaaaaaaaaaaaaaaaaaaaaaaaaaaaaaaaaaaaaaaaaaaaaaaaaaaaaaaaaaaaaaaaaaaaaaaaaaaaaaaaaaaaaaaaaaaaaaaaaaaaaaaaaaaaaaaaaaaaaaaaaaaaaaaaaaaaaaaaaaaaaaaaaaaaaaaaaaaaaaaaaaaaaaaaaaaaaaaaaaaaaaaaaaaaaaaaaaaaaaaaaaaaaaaaaaaaaaaaaaaaaaaaaaaaaaaaaaaaaaaaaaaaaaaaaaaaaaaaaaaaaaaaaaaaaaaaaaaaaaaaaaaaaaaaaaaaaaaaaaaaaaaaaaaaaaaaaaaaaaaaaaaaaaaaaaaaaaaaaaaaaaaaaaaaaaaaaaaaaaaaaaaaaaaaaaaaaaaaaaaaaaaaaaaaaaaaaaaaaaaaaaaaaaaaaaaaaaaaaaaaaaaaaaaaaaaaaaaaaaaaaaaaaaaaaaaaaaaaaaaaaaaaaaaaaaaaaaaaaaaaaaaaaaaaaaaaaaaaaaaaaaaaaaaaaaaaaaaaaaaaaaaaaaaaaaaaaaaaaaaaaaaaaaaaaaaaaaaaaaaaaaaaaaaaaaaaaaaaaaaaaaaaaaaaaaaaaaaaaaaaaaaaaaaaaaaaaaaaaaaaaaaaaaaaaaaaaaaaaaaaaaaaaaaaaaaaaaaaaaaaaaaaaaaaaaaaaaaaaaaaaaaaaaaaaaaaaaaaaaaaaaaaaaaaaaaaaaaaaaaaaaaaaaaaaaaaaaaaaaaaaaaaaaaaaaaaaaaaaaaaaaaaaaaaaaaaaaaaaaaaaaaaaaaaaaaaaaaaaaaaaaaaaaaaaaaaaaaaaaaaaaaaaaaaaaaaaaaaaaaaaaaaaaaaaaaaaaaaaaaaaaaaaaaaaaaaaaaaaaaaaaaaaaaaaaaaaaaaaaaaaaaaaaaaaaaaaaaaaaaaaaaaaaaaaaaaaaaaaaaaaaaaaaaaaaaaaaaaaaaaaaaaaaaaaaaaaaaaaaaaaaaaaaaaaaaaaaaaaaaaaaaaaaaaaaaaaaaaaaaaaaaaaaaaaaaaaaaaaaaaaaaaaaaaaaaaaaaaaaaaaaaaaaaaaaaaaaaaaaaaaaaaaaaaaaaaaaaaaaaaaaaaaaaaaaaaaaaaaaaaaaaaaaaaaaaaaaaaaaaaaaaaaaaaaaaaaaaaaaaaaaaaaaaaaaaaaaaaaaaaaaaaaaaaaaaaaaaaaaaaaaaaaaaaaaaaaaaaaaaaaaaaaaaaaaaaaaaaaaaaaaaaaaaaaaaaaaaaaaaaaaaaaaaaaaaaaaaaaaaaaaaaaaaaaaaaaaaaaaaaaaaaaaaaaaaaaaaaaaaaaaaaaaaaaaaaaaaaaaaaaaaaaaaaaaaaaaaaaaaaaaaaaaaaaaaaaaaaaaaaaaaaaaaaaaaaaaaaaaaaaaaaaaaaaaaaaaaaaaaaaaaaaaaaaaaaaaaaaaaaaaaaaaaaaaaaaaaaaaaaaaaaaaaaaaaaaaaaaaaaaaaaaaaaaaaaaaaaaaaaaaaaaaaaaaaaaaaaaaaaaaaaaaaaaaaaaaaaaaaaaaaaaaaaaaaaaaaaaaaaaaaaaaaaaaaaaaaaaaaaaaaaaaaaaaaaaaaaaaaaaaaaaaaaaaaaaaaaaaaaaaaaaaaaaaaaaaaaaaaaaaaaaaaaaaaaaaaaaaaaaaaaaaaaaaaaaaaaaaaaaaaaaaaaaaaaaaaaaaaaaaaaaaaaaaaaaaaaaaaaaaaaaaaaaaaaaaaaaaaaaaaaaaaaaaaaaaaaaaaaaaaaaaaaaaaaaaaaaaaaaaaaaaaaaaaaaaaaaaaaaaaaaaaaaaaaaaaaaaaaaaaaaaaaaaaaaaaaaaaaaaaaaaaaaaaaaaaaaaaaaaaaaaaaaaaaaaaaaaaaaaaaaaaaaaaaaaaaaaaaaaaaaaaaaaaaaaaaaaaaaaaaaaaaaaaaaaaaaaaaaaaaaaaaaaaaaaaaaaaaaaaaaaaaaaaaaaaaaaaaaaaaaaaaaaaaaaaaaaaaaaaaaaaaaaaaaaaaaaaaaaaaaaaaaaaaaaaaaaaaaaaaaaaaaaaaaaaaaaaaaaaaaaaaaaaaaaaaaaaaaaaaaaaaaaaaaaaaaaaaaaaaaaaaaaaaaaaaaaaaaaaaaaaaaaaaaaaaaaaaaaaaaaaaaaaaaaaaaaaaaaaaaaaaaaaaaaaaaaaaaaaaaaaaaaaaaaaaaaaaaaaaaaaaaaaaaaaaaaaaaaaaaaaaaaaaaaaaaaaaaaaaaaaaaaaaaaaaaaaaaaaaaaaaaaaaaaaaaaaaaaaaaaaaaaaaaaaaaaaaaaaaaaaaaaaaaaaaaaaaaaaaaaaaaaaaaaaaaaaaaaaaaaaaaaaaaaaaaaaaaaaaaaaaaaaaaaaaaaaaaaaaaaaaaaaaaaaaaaaaaaaaaaaaaaaaaaaaaaaaaaaaaaaaaaaaaaaaaaaaaaaaaaaaaaaaaaaaaaaaaaaaaaaaaaaaaaaaaaaaaaaaaaaaaaaaaaaaaaaaaaaaaaaaaaaaaaaaaaaaaaaaaaaaaaaaaaaaaaaaaaaaaaaaaaaaaaaaaaaaaaaaaaaaaaaaaaaaaaaaaaaaaaaaaaaaaaaaaaaaaaaaaaaaaaaaaaaaaaaaaaaaaaaaaaaaaaaaaaaaaaaaaaaaaaaaaaaaaaaaaaaaaaaaaaaaaaaaaaaaaaaaaaaaaaaaaaaaaaaaaaaaaaaaaaaaaaaaaaaaaaaaaaaaaaaaaaaaaaaaaaaaaaaaaaaaaaaaaaaaaaaaaaaaaaaaaaaaaaaaaaaaaaaaaaaaaaaaaaaaaaaaaaaaaaaaaaaaaaaaaaaaaaaaaaaaaaaaaaaaaaaaaaaaaaaaaaaaaaaaaaaaaaaaaaaaaaaaaaaaaaaaaaaaaaaaaaaaaaaaaaaaaaaaaaaaaaaaaaaaaaaaaaaaaaaaaaaaaaaaaaaaaaaaaaaaaaaaaaaaaaaaaaaaaaaaaaaaaaaaaaaaaaaaaaaaaaaaaaaaaaaaaaaaaaaaaaaaaaaaaaaaaaaaaaaaaaaaaaaaaaaaaaaaaaaaaaaaaaaaaaaaaaaaaaaaaaaaaaaaaaaaaaaaaaaaaaaaaaaaaaaaaaaaaaaaaaaaaaaaaaaaaaaaaaaaaaaaaaaaaaaaaaaaaaaaaaaaaaaaaaaaaaaaaaaaaaaaaaaaaaaaaaaaaaaaaaaaaaaaaaaaaaaaaaaaaaaaaaaaaaaaaaaaaaaaaaaaaaaaaaaaaaaaaaaaaaaaaaaaaaaaaaaaaaaaaaaaaaaaaaaaaaaaaaaaaaaaaaaaaaaaaaaaaaaaaaaaaaaaaaaaaaaaaaaaaaaaaaaaaaaaaaaaaaaaaaaaaaaaaaaaaaaaaaaaaaaaaaaaaaaaaaaa

SEQ ID NO: 19032 - DNA, 17 bp, Artificial Sequence
  Description of Artificial Sequence: Synthetic oligonucleotide
aaataaaatacgaaatg

SEQ ID NO: 19033 - DNA, 132 bp, Artificial Sequence
  Description of Artificial Sequence: Synthetic polynucleotide
tcaagctcatttcctggtatgtggctggggccagagactggctcttaaaaagtgcagggtctggcgccctctggtggctggctcagaaaaagggccctgacaactcttttcatcttctaggtatgacaacga

We claim:

1. A Natural Killer (NK) cell comprising:
(a) one or more genomic edits that results in loss of function of one or more genes, wherein the one or more genes encode adenosine A2a receptor (ADORA2A), β-2 microglobulin (B2M), class II major histocompatibility complex transactivator (CIITA), cytokine inducible SH2 containing protein (CISH), two or more human leukocyte antigen (HLA) class II histocompatibility antigen alpha chain genes, two or more HLA class II histocompatibility antigen beta chain genes, natural killer group 2 member A receptor (NKG2A), programmed cell death protein 1 (PD-1), T cell immunoreceptor with Ig and ITIM domains (TIGIT), an agonist of the TGF beta signaling pathway (e.g., transforming growth factor beta receptor II (TGFβRII)), or any combination of two or more thereof; and
(b) a genome comprising a first exogenous coding sequence for FcγRIII (CD16) or variant thereof and a second exogenous coding sequence for a membrane bound interleukin 15 (mbIL-15), wherein the first exogenous coding sequence and second exogenous coding sequence are in frame with and downstream (3′) of a coding sequence of an essential gene, and wherein at least part of the essential gene comprises an exogenous coding sequence.

2. The NK cell of claim 1, wherein the genome comprises:
(i) the first exogenous coding sequence and the second exogenous coding sequence at a first allele of the essential gene; and
(ii) the first exogenous coding sequence and the second exogenous coding sequence at a second allele of the essential gene.

3. The NK cell of claim 1 or 2, wherein the first exogenous coding sequence is upstream (5′) of the second exogenous coding sequence.

4. The NK cell of claim 3, wherein the genome comprises:
(i) a first regulatory element between the coding sequence of the essential gene and the first exogenous coding sequence; and
(ii) a second regulatory element between the first exogenous coding sequence and the second exogenous coding sequence.

5. The NK cell of claim 4, wherein the first regulatory element is an IRES or 2A element and the second regulatory element is an IRES or 2A element.

6. The NK cell of any one of claims 3-5, wherein the genome comprises a polyadenylation sequence downstream (3′) of the second exogenous coding sequence.

7. The NK cell of claim 6, wherein the genome comprises a 3′ untranslated region (UTR) sequence downstream (3′) of the second exogenous coding sequence and upstream (5′) of the polyadenylation sequence.

8. The NK cell of claim 1 or 2, wherein the second exogenous coding sequence is upstream (5′) of the first exogenous coding sequence.

9. The NK cell of claim 8, wherein the genome comprises:
(i) a first regulatory element between the coding sequence of the essential gene and the second exogenous coding sequence; and
(ii) a second regulatory element between the second exogenous coding sequence and the first exogenous coding sequence.

10. The NK cell of claim 9, wherein the first regulatory element is an IRES or 2A element and the second regulatory element is an IRES or 2A element.

11. The NK cell of any one of claims 8-10, wherein the genome comprises a polyadenylation sequence downstream (3′) of the first exogenous coding sequence.

12. The NK cell of claim 11, wherein the genome comprises a 3′ untranslated region (UTR) sequence downstream (3′) of the first exogenous coding sequence and upstream (5′) of the polyadenylation sequence.

13. The NK cell of any one of the preceding claims, wherein the first exogenous coding sequence is or comprises SEQ ID NO: 166.

14. The NK cell of any one of the preceding claims, wherein the second exogenous coding sequence is or comprises SEQ ID NO: 172.

15. The NK cell of any one of the preceding claims, wherein the CD16 is or comprises the amino acid sequence of SEQ ID NO: 184.

16. The NK cell of any one of the preceding claims, wherein the mbIL-15 comprises an IL-15, a linker, a sushi domain, and an IL-15Rα.

17. The NK cell of claim 16, wherein the mbIL-15 is or comprises the amino acid sequence of SEQ ID NO: 190.

18. The NK cell of any one of the preceding claims, wherein the NK cell is an induced pluripotent stem cell (iPSC)-derived NK (INK) cell.

19. The NK cell of any one of the preceding claims, wherein the essential gene encodes a gene product that is required for survival and/or proliferation of the cell.

20. The NK cell of any one of the preceding claims, wherein the essential gene is a housekeeping gene, e.g., a gene listed in Table 3.

21. The NK cell of any one of the preceding claims, wherein the essential gene encodes glyceraldehyde 3-phosphate dehydrogenase (GAPDH).

22. The NK cell of any one of the preceding claims, wherein the NK cell comprises:
(i) a genomic edit that results in loss of function of CISH; and
(ii) a genomic edit that results in loss of function of TGFβRII.

23. The NK cell of any one of the preceding claims, for use as a medicament.

24. The NK cell of any one of the preceding claims, for use in the treatment of a disease, disorder, or condition, e.g., a tumor and/or a cancer.

25. A progeny or daughter cell of the NK cell of any one of claims 1-24.

26. A population of NK cells comprising the NK cell of any one of claims 1-24.

27. The population of NK cells of claim 26, characterized in that, when contacted with tumor cells, a level of killing of tumor cells by the NK cells is increased relative to a reference level of killing of tumor cells by a reference population of NK cells.

28. The population of NK cells of claim 26 or 27, characterized in that, when contacted with tumor cells and an antibody, a level of antibody-dependent cellular cytotoxicity (ADCC) induced by the NK cells is increased relative to a reference level of ADCC induced by a reference population of NK cells.

29. The population of NK cells of any one of claims 26-28, wherein a level of persistence of the population of NK cells is increased relative to a reference level of persistence of a reference population of NK cells.

30. The population of NK cells of claim 29, wherein the level of persistence is measured following contacting with tumor cells.

31. The population of NK cells of any one of claims 26-30, wherein the reference population of NK cells does not comprise NK cells comprising a genome comprising the first exogenous coding sequence and the second exogenous coding sequence.

32. The population of NK cells of claim 31, wherein the reference population of NK cell does not comprise NK cells comprising a genomic edit that results in loss of function of TGFβRII and a genomic edit that results in loss of function of CISH.

33. A pharmaceutical composition comprising the NK cell, the progeny or daughter cell, or the population of NK cells of any one of claims 1-32.

34. The pharmaceutical composition of claim 33, comprising a pharmaceutically acceptable carrier.

35. A method of treating a condition, disorder, and/or disease, comprising administering to a subject suffering therefrom the NK cell, the progeny or daughter cell, or the population of NK cells of any one of claims 1-32.

36. The method of claim 35, wherein the subject is suffering from a tumor, e.g., a solid tumor.

37. The method of claim 35, wherein the subject is suffering from a cancer.

38. A method, comprising administering to a subject the NK cell, the progeny or daughter cell, or the population of NK cells of any one of claims 1-32.

39. A method of treating a condition, disorder, and/or disease, comprising administering to a subject suffering therefrom the pharmaceutical composition of claim 33 or 34.

40. The method of claim 39, wherein the subject is suffering from a tumor, e.g., a solid tumor.

41. The method of claim 39, wherein the subject is suffering from a cancer.

42. A method, comprising administering to a subject the pharmaceutical composition of claim 33 or 34.

43. The method of any one of claims 35-42, wherein the NK cell, the progeny or daughter cell, or the population of NK cells is allogenic to the subject.

44. The method of any one of claims 35-42, wherein the NK cell, the progeny or daughter cell, or the population of NK cells is autologous to the subject.

45. The method of any one of claims 35-44, further comprising administering an antibody to the subject.

46. The method of claim 45, wherein the antibody is trastuzumab, rituximab, or cetuximab.

47. The method of any one of claims 35-46, wherein the subject is a human.

48. A method of increasing tumor killing ability of a NK cell, the method comprising:
(a) knocking-into the genome of the NK cell a first exogenous coding sequence for FcγRIII (CD16) or variant thereof and a second exogenous coding sequence for a membrane bound interleukin 15 (mbIL-15), wherein the first exogenous coding sequence and the second exogenous coding sequence are knocked-in in frame and downstream (3′) of an essential gene; and
(b) knocking-out one or more genes of the NK cell, wherein the one or more genes encode adenosine A2a receptor (ADORA2A), β-2 microglobulin (B2M), class II major histocompatibility complex transactivator (CIITA), cytokine inducible SH2 containing protein (CISH), two or more human leukocyte antigen (HLA) class II histocompatibility antigen alpha chain genes, two or more HLA class II histocompatibility antigen beta chain genes, natural killer group 2 member A receptor (NKG2A), programmed cell death protein 1 (PD-1), T cell immunoreceptor with Ig and ITIM domains (TIGIT), an agonist of the TGF beta signaling pathway (e.g., transforming growth factor beta receptor II (TGFβRII)), or any combination of two or more thereof;
thereby increasing a level of tumor killing activity of the NK cell relative to a reference level of tumor killing activity of a reference NK cell.

49. A method of increasing antibody-dependent cellular cytotoxicity (ADCC) induced by a NK cell, the method comprising:
(a) knocking-into the genome of the NK cell a first exogenous coding sequence for FcγRIII (CD16) or variant thereof and a second exogenous coding sequence for a membrane bound interleukin 15 (mbIL-15), wherein the first exogenous coding sequence and the second exogenous coding sequence are knocked-in in frame and downstream (3′) of an essential gene; and
(b) knocking-out one or more genes of the NK cell, wherein the one or more genes encode adenosine A2a receptor (ADORA2A), β-2 microglobulin (B2M), class II major histocompatibility complex transactivator (CIITA), cytokine inducible SH2 containing protein (CISH), two or more human leukocyte antigen (HLA) class II histocompatibility antigen alpha chain genes, two or more HLA class II histocompatibility antigen beta chain genes, natural killer group 2 member A receptor (NKG2A), programmed cell death protein 1 (PD-1), T cell immunoreceptor with Ig and ITIM domains (TIGIT), an agonist of the TGF beta signaling pathway (e.g., transforming growth factor beta receptor II (TGFβRII)), or any combination of two or more thereof;
thereby increasing a level of ADCC induced by the NK cell relative to a reference level of ADCC induced by a reference NK cell.

50. A method of increasing persistence of a NK cell, the method comprising:
(a) knocking-into the genome of the NK cell a first exogenous coding sequence for FcγRIII (CD16) or variant thereof and a second exogenous coding sequence for a membrane bound interleukin 15 (mbIL-15), wherein the first exogenous coding sequence and the second exogenous coding sequence are knocked-in in frame and downstream (3′) of an essential gene; and
(b) knocking-out one or more genes of the NK cell, wherein the one or more genes encode adenosine A2a receptor (ADORA2A), β-2 microglobulin (B2M), class II major histocompatibility complex transactivator (CIITA), cytokine inducible SH2 containing protein (CISH), two or more human leukocyte antigen (HLA) class II histocompatibility antigen alpha chain genes, two or more HLA class II histocompatibility antigen beta chain genes, natural killer group 2 member A receptor (NKG2A), programmed cell death protein 1 (PD-1), T cell immunoreceptor with Ig and ITIM domains (TIGIT), an agonist of the TGF beta signaling pathway (e.g., transforming growth factor beta receptor II (TGFβRII)), or any combination of two or more thereof;
thereby increasing a level of persistence of the NK cell relative to a reference level of persistence of a reference NK cell.

51. The method of claim 50, wherein the level of persistence is measured following contacting the NK cell with tumor cells.

52. The method of any one of claims 48-51, wherein the reference NK cell does not comprise a genome comprising the first exogenous coding sequence and the second exogenous coding sequence.

53. The method of any one of claims 48-52, wherein the reference NK cell does not comprise a genomic edit that results in loss of function of TGFβRII and a genomic edit that results in loss of function of CISH.

54. A method of manufacturing a genetically modified NK cell, the method comprising:
(a) knocking-into the genome of an NK cell a first exogenous coding sequence for FcγRIII (CD16) or variant thereof and a second exogenous coding sequence for a membrane bound interleukin 15 (mbIL-15), wherein the first exogenous coding sequence and the second exogenous coding sequence are knocked-in in frame and downstream (3′) of an essential gene; and
(b) knocking-out one or more genes of the NK cell, wherein the one or more genes encode adenosine A2a receptor (ADORA2A), β-2 microglobulin (B2M), class II major histocompatibility complex transactivator (CIITA), cytokine inducible SH2 containing protein (CISH), two or more human leukocyte antigen (HLA) class II histocompatibility antigen alpha chain genes, two or more HLA class II histocompatibility antigen beta chain genes, natural killer group 2 member A receptor (NKG2A), programmed cell death protein 1 (PD-1), T cell immunoreceptor with Ig and ITIM domains (TIGIT), an agonist of the TGF beta signaling pathway (e.g., transforming growth factor beta receptor II (TGFβRII)), or any combination of two or more thereof.

55. The method of any one of claims 48-54, wherein knocking-in comprises contacting the NK cell with:
(i) a nuclease that causes a break within an endogenous coding sequence of the essential gene, and
(ii) a donor template that comprises a knock-in cassette comprising the first exogenous coding sequence and the second exogenous coding sequence in frame with and downstream (3′) of an exogenous coding sequence or partial coding sequence of the essential gene, wherein the knock-in cassette is integrated into the genome of the cell by homology-directed repair (HDR) of the break.

56. The method of claim 55, wherein the nuclease is a CRISPR/Cas nuclease and knocking-in further comprises contacting the NK cell with a guide molecule for the CRISPR/Cas nuclease.

57. The method of any one of claims 48-56, wherein knocking-out comprises contacting the NK cell with one or more nucleases that cause a break within an endogenous coding sequence of the one or more genes.

58. The method of claim 57, wherein the one or more nucleases are CRISPR/Cas nucleases and knocking-out further comprises contacting the NK cell with one or more guide molecules for the CRISPR/Cas nuclease.

59. The method of any one of claims 48-58, wherein the NK cell is an induced pluripotent stem cell (iPSC)-derived NK (iNK) cell.

60. The method of any one of claims 48-59, wherein the essential gene encodes a gene product that is required for survival and/or proliferation of the NK cell.

61. The method of any one of claims 48-59, wherein the essential gene is a housekeeping gene, e.g., a gene listed in Table 3.

62. The method of any one of claims 48-60, wherein the essential gene encodes glyceraldehyde 3-phosphate dehydrogenase (GAPDH).

63. The method of any one of claims 48-62, comprising knocking-out a gene encoding CISH and knocking-out a gene encoding TGFβRII.
